(19) United States
(12) Patent Application Publication
(10) Pub. No.: US 2019/0151365 A1
(43) Pub. Date: May 23, 2019

(54) COMBINATION THERAPIES OF CHIMERIC ANTIGEN RECEPTORS AND PD-1 INHIBITORS

(71) Applicants: Novartis AG, Basel (CH); The Trustees of the University of Pennsylvania, Philadelphia, PA (US)

(72) Inventors: Oezlem Anak, Riedisheim (FR); Sanela Bilic, Urbandale, IA (US); Jennifer Brogdon, Sudbury, MA (US); John Scott Cameron, Belmont, MA (US); William Chou, Maplewood, NJ (US); Stephan Grupp, Havertown, PA (US); Danny Roland Howard, Jr., Washington, NJ (US); Randi Isaacs, Basking Ridge, NJ (US); Carl H. June, Merion Station, PA (US); Simon Lacey, Media, PA (US); Shannon Maude, Conshohocken, PA (US); Jan J. Melenhorst, Cherry Hill, NJ (US); Stephen Shuster, Springfield, PA (US); Alfonso Quintas-Cardama, Malvern (US)

(73) Assignees: Novartis AG, Basel (CH); The Trustees of the University of Pennsylvania, Philadelphia, PA (US); The Trustees of the University of Pennsylvania, Philadelphia, PA (US)

(21) Appl. No.: 16/321,322

(22) PCT Filed: Jul. 28, 2017
(86) PCT No.: PCT/US2017/044425

§ 371 Date: Jan. 28, 2019

Related U.S. Application Data
(60) Provisional application No. 62/368,100, filed on Jul. 28, 2016.
(60) Provisional application No. 62/455,547, filed on Feb. 6, 2017.
(60) Provisional application No. 62/482,846, filed on Apr. 7, 2017.
(60) Provisional application No. 62/514,542, filed on Jun. 2, 2017.

(51) Int. Cl. A61K 35/17; C07K 14/725; C07K 16/28; A61P 35/00; G01N 33/574

(52) U.S. Cl. CPC A61K 35/17; C07K 14/7051; C07K 16/2827; A61P 35/00; G01N 33/574; C07K 16/2818

(57) ABSTRACT

Provided are compositions and methods for treating diseases, e.g., cancers, e.g., diseases associated with expression of an antigen, e.g., CD 19, comprising administering a cell that expresses a chimeric antigen receptor (CAR) specific to the antigen, e.g., CD19, in combination with a PD-1 inhibitor.

[0001] This application claims priority to U.S. Ser. No. 62/368,100 filed Jul. 28, 2016, U.S. Ser. No. 62/455,547 filed Feb. 6, 2017, U.S. Ser. No. 62/482,846 filed Apr. 7, 2017, and U.S. Ser. No. 62/514,542 filed Jun. 2, 2017, the contents of all of which are incorporated herein by reference in their entireties.

### SEQUENCE LISTING

[0002] The instant application contains a Sequence Listing which has been submitted electronically in ASCII format and is hereby incorporated by reference in its entirety. Said ASCII copy, created on Jul. 27, 2017, is named N2067-7109WO_SL.txt and is 907,582 bytes in size.

### FIELD OF THE INVENTION

[0003] The present invention relates generally to the use of cells, e.g., immune effector cells, engineered to express a Chimeric Antigen Receptor (CAR) that targets an antigen, e.g., CD19, in combination with PD-1 inhibitors to treat a disease.

### BACKGROUND OF THE INVENTION

[0004] Many patients with B cell malignancies are incurable with standard therapy. In addition, traditional treatment options often have serious side effects. Attempts have been made in cancer immunotherapy, however, several obstacles render this a very difficult goal to achieve clinical effectiveness. Although hundreds of so-called tumor antigens have been identified, these are generally derived from self and thus are poorly immunogenic. Furthermore, tumors use several mechanisms to render themselves hostile to the initiation and propagation of immune attack.

[0005] Recent developments using chimeric antigen receptor (CAR) modified autologous T cell (CART) therapy, which relies on redirecting T cells to a suitable cell-surface molecule on cancer cells such as B cell malignancies, show promising results in harnessing the power of the immune system to treat B cell malignancies and other cancers (see, e.g., Sadelain et al., Cancer Discovery 3:388-398 (2013)). The clinical results of the murine derived CART19 (i.e., “CTL019”) have shown promise in establishing complete remissions in patients suffering with CLL as well as in childhood ALL (see, e.g., Kalos et al., Sci Transl Med 3:95ra73 (2011), Porter et al., NEJM 365:725-733 (2011), Grupp et al., NEJM 368:1509-1518 (2013)). Besides the ability for the chimeric antigen receptor on the genetically modified T cells to recognize and destroy the targeted cells, a successful therapeutic T cell therapy needs to have the ability to proliferate and persist over time, in order to survey for leukemic relapse. The variable quality of T cells, resulting from anergy, suppression, or exhaustion, will have effects on CAR-transformed T cells' performance, over which skilled practitioners have limited control at this time. To be effective, CAR transformed patient T cells need to persist and maintain the ability to proliferate in response to the cognate antigen. It has been shown that ALL patient T cells perform can do this with CART19 comprising a murine scFv (see, e.g., Grupp et al., NEJM 368:1509-1518 (2013)).

### SUMMARY OF THE INVENTION

[0006] The present disclosure features, at least in part, methods and compositions for treating a disease (e.g., cancer), e.g., disease associated with an antigen, e.g., disease associated with the expression of CD19, e.g., a cancer, in a subject by using a combination therapy that includes a cell, e.g., an immune effector cell, expressing a chimeric antigen receptor (CAR) that specifically binds to an antigen, e.g., antigen described herein, e.g., CD19 (also referred to herein as a “CD19 CAR-expressing cell”) (also referred to herein as a “CAR therapy”) and an inhibitor of Programmed Death-1 (also referred to herein as a “PD-1 inhibitor”). In some embodiments, the CAR that specifically binds to the antigen, e.g., CD19, includes an antigen binding domain, e.g., a CD19 binding domain, a transmembrane domain, and an intracellular signaling domain, e.g., as described herein. In some embodiments, the PD-1 inhibitor is an antibody molecule, a polypeptide, a small molecule, or a polynucleotide, e.g., an inhibitory nucleic acid. In one embodiment, the PD-1 inhibitor is an antibody molecule, e.g., an antibody molecule described herein. Without wishing to be bound by theory, treating a subject having a disease (e.g., cancer), e.g., disease associated with CD19 expression, e.g., a cancer described herein, with a combination therapy that includes a CAR-expressing cell (e.g., CD19 CAR-expressing cell) and a PD-1 inhibitor is believed to result in improved inhibition or reduction of tumor progression in the subject, e.g., as compared to treating a subject having the disease with either a CAR-expressing cell (e.g., CD19 CAR-expressing cell) or a PD-1 inhibitor alone. For example, inhibition of the PD-1/PD-L1 interaction, in combination with the CAR therapy, can result in one or more of: (i) activation (or reactivation) of CAR-expressing cells (e.g., CD19 CAR-expressing cells); (ii) expansion in a population of CAR-expressing cells; (iii) sustained duration of a therapeutic response to a CAR therapy; (iv) increased persistence of the CAR therapy, (v) reduction of exhausted effector T cells function, (vi) reversal or relief of T cell exhaustion, (vii) increased cytokine (e.g., IL-6, or IL-2) levels; or (viii) decreased expression of checkpoint inhibitors (e.g., one or more of PD-1, TIM-3 or LAG-3) on immune effector cells (e.g., CD4+ and/or CD8+ cells, e.g., CAR-expressing immune effector cells), thus resulting in an improved therapeutic outcome in a subject treated with the combination therapy, e.g., compared to a subject receiving a CAR-therapy alone or a PD-1 inhibitor alone.

[0007] Accordingly, in one aspect, the disclosure features a method of treating a subect having a disease (e.g., cancer), e.g., a disease associated with an antigen, e.g., a disease associated with expression of CD19, e.g., a cancer as described herein. The method includes administering to the subject a cell, e.g., a population of cells, comprising, e.g., expressing a CAR that specifically binds to an antigen, e.g., CD19 (also referred to herein as a CAR therapy), and a PD-1 inhibitor. In one embodiment, the CAR-expressing cell and the PD-1 inhibitor is administered sequentially. In one embodiment, the PD-1 inhibitor is administered prior to administration of the CAR-expressing cell (e.g., CD19 CAR-expressing cell). In one embodiment, the PD-1 inhibitor is administered after the administration of the CAR-expressing cell (e.g., CD19 CAR-expressing cell). In one embodiment, the PD-1 inhibitor and CAR-expressing cell (e.g., CD19 CAR-expressing cell) are administered simultaneously or concurrently.

[0008] In embodiments, the CAR-expressing cell e.g., CD19 CAR-expressing cell described herein, and the PD-1 inhibitor are administered sequentially, e.g., in any order. In one embodiment, the combination is administered in a treatment interval. In one embodiment, the treatment interval comprises a single dose of the PD-1 inhibitor and a single dose of the CAR-expressing cell (e.g., in any order). In another embodiment, the treatment interval comprises multiple doses (e.g., a first and second dose) of the PD-1 inhibitor and a dose of the CAR-expressing cell (e.g., in any order).

[0009] In a related aspect, the disclosure provides a method of treating a subject having a cancer. The method comprises administering to the subject:
[0010] (i) a CAR therapy comprising a population of immune effector cells, comprising, e.g., expressing, a CAR, wherein the CAR comprises an antigen (e.g., a CD19) binding domain, a transmembrane domain, and an intracellular signaling domain; and
[0011] (ii) a PD-1 inhibitor.
   In some embodiments, the dose of the PD-1 inhibitor, e.g., anti-PD-1 antibody molecule, is about 200 mg to about 450 mg, e.g., about 300 mg to about 400 mg, e.g., administered every 2 weeks, 3 weeks, 4 weeks, or 5 weeks.

[0012] In another aspect, the disclosure provides a method of treating a subject having a cancer. The method comprises administering to the subject:
[0013] (i) a CAR therapy comprising a population of immune effector cells comprising, e.g., expressing, a CAR, wherein the CAR comprises an antigen (e.g., a CD19) binding domain, a transmembrane domain, and an intracellular signaling domain; and
[0014] (ii) a PD-1 inhibitor.

[0015] In some embodiments, administration of the PD-1 inhibitor is initiated 20 days or less after administration of the CAR therapy. For example, administration of the PD-1 inhibitor is initiated 16 days or less, 15 days or less, 14 days or less, 13 days or less, 12 days or less, 11 days or less, 10 days or less, 9 days or less, 8 days or less, 7 days or less, 6 days or less, 5 days or less, 4 days or less, 3 days or less, 2 days or less, after administration of the CAR therapy.

[0016] In another aspect, the disclosure provides a method of treating a subject having a cancer. The method comprises administering to the subject:
[0017] (i) a CAR therapy comprising a population of immune effector cells comprising, e.g., expressing, a CAR, wherein the CAR comprises an antigen (e.g., a CD19) binding domain, a transmembrane domain, and an intracellular signaling domain; and
[0018] (ii) a PD-1 inhibitor.

[0019] In some embodiments, administration of the PD-1 inhibitor is initiated after the subject has, or is identified as having, one or more of the following:
[0020] (a) a partial or no detectable response to the CAR therapy,
[0021] (b) a relapsed cancer after the CAR therapy,
[0022] (c) a cancer refractory to the CAR therapy;
[0023] (d) a progressive form of the cancer after the CAR therapy; or
[0024] (e) B cell recovery, e.g., less than 3 months, after the CAR therapy.

[0025] In yet another aspect, the disclosure provides a method of treating a subject having a cancer. The method comprises administering to the subject:
[0026] (i) a CAR therapy comprising a population of immune effector cells comprising, e.g., expressing, a chimeric antigen receptor (CAR), wherein the CAR comprises an antigen (e.g., a CD19) binding domain, a transmembrane domain, and an intracellular signaling domain; and
[0027] (ii) a PD-1 inhibitor.
   In some embodiments, administration of the PD-1 inhibitor is initiated after administration of the CAR therapy, and the subject does not have, or has not been identified as having, one or more of the following:
[0028] (a) a partial or no detectable response to the CAR therapy,
[0029] (b) a relapsed cancer after the CAR therapy,
[0030] (c) a cancer refractory to the CAR therapy;
[0031] (d) a progressive form of the cancer; or
[0032] (e) B cell recovery, e.g., less than 3 months, after the CAR therapy.

[0033] In another aspect, the disclosure provides a CAR therapy for use in combination with a PD-1 inhibitor in any of the methods disclosed herein. In other embodiments, disclosed herein is the use of a CAR therapy in combination with a PD-1 inhibitor in the preparation of a medicament for treating a disorder, e.g., a proliferative disorder, e.g., a cancer.

[0034] Additional features or embodiments of any of the methods, uses, compositions or combinations disclosed herein include one or more of the following:

[0035] In some embodiments, one or more, e.g., 1, 2, 3, 4, or 5 or more, subsequent doses of the PD-1 inhibitor can be administered. In one embodiment, up to 6 doses of the PD-1 inhibitor are administered.

[0036] In some embodiments, the method or use further comprises evaluating the presence or absence of CRS in the subject. In one embodiment, the subject does not have, or is identified, as not having CRS, e.g., severe CRS (e.g., CRS grade 3 or grade 4), after the CAR therapy. In other embodiments, administration of the PD-1 inhibitor is initiated after the subject is identified as not having CRS, e.g., severe CRS (e.g., CRS grade 3 or grade 4), after the CAR therapy.

[0037] In other embodiments, administration of the PD-1 inhibitor is initiated after treatment of CRS, e.g., CRS resolution, after the CAR therapy. In one embodiment, the CRS is resolved to grade 1. In an embodiment, the CRS is resolved to undetectable levels.

[0038] Where the treatment interval comprises a single dose of the PD-1 inhibitor and a single dose of the CAR-expressing cell, in certain embodiments, the dose of PD-1 inhibitor and the dose of the CAR-expressing cell are administered simultaneously or concurrently. For example, the dose of the PD-1 inhibitor and the dose of the CAR-expressing cell are administered within 20 days, 18 days, 16 days, 15 days, 12 days, 10 days, 9 days, 8 days, 7 days, 6 days, 5 days, 4 days, 3 days, 2 days, 1 day, 24 hours, 12 hours, 6 hours, 4 hours, 2 hours, or less) of each other. In embodiments, the treatment interval is initiated upon administration of the first-administered dose and completed upon administration of the later-administered dose.

[0039] Where the treatment interval comprises a single dose of the PD-1 inhibitor and a single dose of the CAR-expressing cell, in certain embodiments, the dose of the PD-1 inhibitor and the dose of the CAR-expressing cell are administered sequentially. In embodiments, the dose of the CAR-expressing cell is administered prior to the dose of the PD-1 inhibitor, and the treatment interval is initiated upon administration of the dose of the CAR-expressing cell and completed upon administration of the dose of the PD-1 inhibitor. In other embodiments, the dose of the PD-1 inhibitor is administered prior to the dose of the CAR-expressing cell, and the treatment interval is initiated upon administration of the dose of the PD-1 inhibitor and completed upon administration of the dose of the CAR-expressing cell. In one embodiment, the treatment interval further comprises one or more, e.g., 1, 2, 3, 4, or 5 or more, subsequent doses of the PD-1 inhibitor. In such embodiments, the treatment interval comprises two, three, four, five, six, or more, doses of PD-1 inhibitor and one dose of the CAR-expressing cell. In one embodiment, the dose of the CAR-expressing cell is administered at least 2 days, at least 3 days, at least 4 days, at least 5 days, at least 6 days, at least 7 days, at least 8 days, at least 9 days, at least 10 days, at least 8 days, at least 9 days, at least 10 days, at least 11 days, at least 12 days, at least 13 days, or at least 2 weeks before or after a dose of PD-1 inhibitor is administered. In embodiments where more than one dose of PD-1 inhibitor is administered, the dose of the CAR-expressing cell is administered at least 2 days, at least 3 days, at least 4 days, at least 5 days, at least 6 days, at least 7 days, at least 8 days, at least 9 days, at least 10 days, at least 8 days, at least 9 days, at least 10 days, at least 11 days, at least 12 days, at least 13 days, or at least 2 weeks before or after the first dose of PD-1 inhibitor is administered or after the initiation of the treatment interval. In one embodiment, the dose of the PD-1 inhibitor is administered about 25-40 days (e.g., about 25-30, 30-35, or 35-40 days, e.g., about 35 days) or about 2-7 weeks (e.g., 2, 3, 4, 5, 6, or 7 weeks) after the dose of the CAR-expressing cell is administered. In embodiments, where more than one dose of PD-1 inhibitor is administered, the second PD-1 inhibitor dose is administered about 15-30 days (e.g., about 15-20, 20-25, or 25-30 days, e.g., about 20 days) or about 2-5 weeks (e.g., 2, 3, 4, or 5 weeks) after the first dose of PD-1 inhibitor is administered.

[0040] Where the treatment interval comprises multiple doses (e.g., a first and second, and optionally one or more subsequent doses) of a PD-1 inhibitor and a dose of a CAR-expressing cell, in certain embodiments, the dose of the CAR-expressing cell and the first dose of the PD-1 inhibitor are administered simultaneously or concurrently, e.g., within 2 days (e.g., within 2 days, 1 day, 24 hours, 12 hours, 6 hours, 4 hours, 2 hours, or less) of each other. In embodiments, the second dose of the PD-1 inhibitor is administered after either (i) the dose of the CAR-expressing cell or (ii) the first dose of the PD-1 inhibitor, whichever is later. In embodiments, the second dose of the PD-1 inhibitor is administered at least 2 days (e.g., at least 2 days, 3 days, 4 days, 5 days, 6 days, 7 days, 1 week, 2 weeks, 3 weeks, 4 weeks, 5 weeks, or more) after (i) or (ii). In embodiments, a subsequent dose (e.g., third, fourth, or fifth dose, and so on) of the PD-1 inhibitor is administered after the second dose of the PD-1 inhibitor. In embodiments, the subsequent dose of the PD-1 inhibitor is administered at least 2 days (e.g., at least 2 days, 3 days, 4 days, 5 days, 6 days, 7 days, 1 week, 2 weeks, 3 weeks, 4 weeks, 5 weeks, or more) after the second dose of the PD-1 inhibitor. In such embodiments, the treatment interval is initiated upon administration of the first-administered dose and completed upon administration of the second dose (or subsequent dose) of the PD-1 inhibitor.

[0041] In other embodiments where the treatment interval comprises multiple doses (e.g., a first and second, and optionally a subsequent dose) of a PD-1 inhibitor and a dose of a CAR-expressing cell, the dose of the CAR-expressing cell and the first dose of the PD-1 inhibitor are administered sequentially. In embodiments, the dose of the CAR-expressing cell is administered after administration of the first dose of the PD-1 inhibitor but before the administration of the second dose of the PD-1 inhibitor. In embodiments, a subsequent dose (e.g., third, fourth, or fifth dose, and so on) of the PD-1 inhibitor is administered after the second dose of the PD-1 inhibitor. In such embodiments, the treatment interval is initiated upon administration of the first dose of the PD-1 inhibitor and completed upon administration of the second dose (or subsequent dose) of the PD-1 inhibitor. In one embodiment, the second dose of the PD-1 inhibitor is administered at least 2 days (e.g., at least 2 days, 3 days, 4 days, 5 days, 6 days, 7 days, 1 week, 2 weeks, 3 weeks, 4 weeks, 5 weeks, or more) after administration of the first dose of the PD-1 inhibitor. In an embodiment, where the PD-1 inhibitor is an inhibitory RNA, e.g., siRNA, the second dose is administered every 2 days to every 2 weeks. In an embodiment, where the PD-1 inhibitor is an antibody molecule, the second dose is administered every 2-3 weeks. In one embodiment, the subsequent dose (e.g., third, fourth, or fifth dose, and so on) of the PD-1 inhibitor is administered at least 2 days (e.g., at least 2 days, 3 days, 4 days, 5 days, 6 days, 7 days, 1 week, 2 weeks, 3 weeks, 4 weeks, 5 weeks, or more) after the second dose of the PD-1 inhibitor. In one embodiment, the dose of the CAR-expressing cell is administered at least 2 days (e.g., at least 2 days, 3 days, 4 days, 5 days, 6 days, 7 days, 1 week, 2 weeks, 3 weeks, 4 weeks, 5 weeks, or more) after administration of the first dose of the PD-1 inhibitor. In one embodiment, the second dose of the PD-1 inhibitor is administered at least 2 days (e.g., at least 2 days, 3 days, 4 days, 5 days, 6 days, 7 days, 1 week, 2 weeks, 3 weeks, 4 weeks, 5 weeks, or more) after administration of the dose of the CAR-expressing cell. In embodiments, the PD-1 inhibitor (e.g., an anti-PD-1 antibody molecule) is administered every 2-3 weeks (e.g., every 2 weeks or every 3 weeks) during the treatment interval.

[0042] In other embodiments, the dose of the CAR-expressing cell is administered before administration of the first dose of the PD-1 inhibitor. In such embodiments, the treatment interval is initiated upon administration of the CAR-expressing cell and completed upon administration of the first dose (or subsequent dose) of the PD-1 inhibitor. In embodiments, the first dose of the PD-1 inhibitor is administered at least 2 days (e.g., at least 2 days, at least 3 days, at least 4 days, at least 5 days, at least 6 days, at least 1 week, at least 8 days, at least 9 days, at least 10 days, at least 11 days, at least 12 days, at least 13 days, at least 2 weeks, at least 15 days, at least 16 days, at least 17 days, at least 18 days, at least 19 days, at least 20 days, at least 3 weeks, at least 4 weeks, at least 5 weeks, or more) after administration of the CAR-expressing cell. In some embodiments, administration of the first dose of the PD-1 inhibitor occurs about 5 to about 10 days, e.g., about 8 days, after administration of the CAR-expressing cell. In other embodiments, administration of the first dose of the PD-1 inhibitor occurs about 10 to about 20 days, e.g., about 15 or 16 days, after administration of the CAR-expressing cell. In embodiments, the second dose of the PD-1 inhibitor is administered at least 2 days (e.g., at least 2 days, at least 3 days, at least 4 days, at least 5 days, at least 6 days, at least 1 week, at least 8 days, at least 9 days, at least 10 days, at least 11 days, at least 12 days, at least 13 days, 2 weeks, at least 15 days, at least 16 days, at least 17 days, at least 18 days, at least 19 days, at least 20 days, 3 weeks, 4 weeks, 5 weeks, or more) after administration of the first dose of the PD-1 inhibitor. In embodiments, the second dose of the PD-1 inhibitor is administered at about 2-4 weeks, e.g., 3 weeks after the first dose of the PD-1 inhibitor. In embodiments, the subsequent dose (e.g., third, fourth, or fifth dose, and so on) of the PD-1 inhibitor is administered at least 2 days (e.g., at least 2 days, 3 days, 4 days, 5 days, 6 days, 7 days, 1 week, 2 weeks, 3 weeks, 4 weeks, 5 weeks, or more) after the second dose of the PD-1 inhibitor. In embodiments, the subsequent dose (e.g., third, fourth, or fifth dose, and so on) of the PD-1 inhibitor is administered at about 2-4 weeks, e.g., 3 weeks after the previous dose of the PD-1 inhibitor. In embodiments, the first dose of the PD1 inhibitor is administered at least 2 days (e.g., at least 2 days, 3 days, 4 days, 5 days, 6 days, 7 days, 1 week, 2 weeks, 3 weeks, 4 weeks, 5 weeks, or more) after administration of the CAR-expressing cell.

[0043] In some embodiments, the treatment interval comprises one, two or three doses (e.g., a first and second, and a third dose) of a PD-1 inhibitor and a dose of a CAR-expressing cell. In one embodiment, the dose of the CAR-expressing cell and the first dose of the PD-1 inhibitor are administered sequentially. For example, the subject, e.g., a patient, receives one, two or three doses of the PD-1 inhibitor starting post administration of a CAR-expressing cell, e.g., about one week to 4 months, e.g., about 14 days to 2 months, after administration of a dose of CAR-expressing cells.

[0044] In one embodiment, any of the treatment intervals described herein can be repeated one or more times, e.g., 1, 2, 3, 4, or 5 more times. In one embodiment, the treatment interval is repeated once, resulting in a treatment regimen comprising two treatment intervals. In an embodiment, the repeated treatment interval is administered at least 1 day, e.g., at least 1 day, at least 2 days, at least 3 days, at least 4 days, at least 5 days, at least 6 days, at least 7 days, at least 2 weeks, at least 1 month, at least 3 months, at least 6 months, at least 1 year or more after the completion of the first or previous treatment interval. In an embodiment, the repeated treatment interval is administered at least 3 days after the completion of the first or previous treatment interval.

[0045] In one embodiment, any of the treatment intervals described herein can be followed by one or more, e.g., 1, 2, 3, 4, or 5, subsequent treatment intervals. The one or more subsequent treatment interval is different from the first or previous treatment interval. By way of example, a first treatment interval consisting of a single dose of a PD-1 inhibitor and a single dose of a CAR-expressing cell is followed by a second treatment interval consisting of multiple doses (e.g., two, three, four, or more doses) of a PD-1 inhibitor and a single dose of a CAR-expressing cell. In one embodiment, the one or more subsequent treatment intervals is administered at least 1 day, e.g., 1 day, 2 days, 3 days, 4 days, 5 days, 6 days, 7 days, or 2 weeks, after the completion of the first or previous treatment interval.

[0046] In any of the methods described herein, one or more subsequent doses, e.g., 1, 2, 3, 4, or 5 or more doses, of the PD-1 inhibitor is administered after the completion of one or more treatment intervals. In embodiments where the treatment intervals are repeated or two or more treatment intervals are administered, one or more subsequent doses, e.g., 1, 2, 3, 4, or 5 or more doses, of the PD-1 inhibitor is administered after the completion of one treatment interval and before the initiation of another treatment interval. In one embodiment, a dose of the PD-1 inhibitor is administered every 5 days, 7 days, 2 weeks, 3 weeks, or 4 weeks after the completion of one or more, or each, treatment intervals.

[0047] In any of the methods described herein, one or more, e.g., 1, 2, 3, 4, or 5 or more, subsequent doses of the CAR-expressing cell are administered after the completion of one or more treatment intervals. In embodiments where the treatment intervals are repeated or two or more treatment intervals are administered, one or more subsequent doses, e.g., 1, 2, 3, 4, or 5, or more doses, of the CAR-expressing cell is administered after the completion of one treatment interval and before the initiation of another treatment interval. In one embodiment, a dose of the CAR-expressing cell is administered every 2 days, 3 days, 4 days, 5 days, 7 days, 2 weeks, 3 weeks, or 4 weeks after the completion of one or more, or each, treatment intervals.

[0048] In one embodiment, the treatment interval comprises a single dose of a CAR-expressing cell that is administered prior to a first dose of a PD-1 inhibitor. In this embodiment, the first dose of the PD-1 inhibitor is administered about 7, about 8, about 9, about 10, about 11, about 12, about 13, about 14, about 15, about 16, about 17, about 18, about 19, about 20, about 25, about 30, or about 35 days after administration of the CAR-expressing cell. In embodiments, a second dose of the PD-1 inhibitor is administered after administration of the first dose of the PD-1 inhibitor. In embodiments, the second dose of the PD-1 inhibitor is administered about 20 days after administration of the first dose of the PD-1 inhibitor, e.g., about 2-4 weeks, e.g., 3 weeks after the first dose of the PD-1 inhibitor. In embodiments, subsequent doses of the PD-1 inhibitor are administered after the second dose of the PD-1 inhibitor, e.g., every 1 week, 2 weeks, 3 weeks, 4 weeks, 5 weeks, 5 days, 7 days, 10 days, 14 days, 20 days, 25 days, 30 days, or 35 days, e.g., about 2-4 weeks, e.g., 3 weeks after the previous dose of the PD-1 inhibitor.

[0049] In an embodiment, the method comprises administering a lymphodepleting chemotherapy to the subject, e.g., prior to administration of the CAR-expressing cell. In embodiments, the lymphodepleting chemotherapy comprises cyclophosphamide, e.g., hyperfractionated cyclophosphamide, e.g., at a dose of about 200-400 mg/m², e.g., about 300 mg/m², e.g., for 1-10 doses (e.g., 1, 2, 3, 4, 5, 6, 7, 8, 9, or 10 doses). In embodiments, the method comprises administering a treatment interval comprising a dose of CAR-expressing cells and multiple doses of a PD-1 inhibitor. In embodiments, the treatment interval comprises a single dose of a CAR-expressing cell (e.g., CD19 CAR-expressing cell) that is administered prior to a first dose of a PD-1 inhibitor, e.g., at least 2 weeks (e.g., 2, 3, 4, 5, 6 weeks or more) prior to the first dose of the PD-1 inhibitor (e.g., about 7, about 8, about 9, about 10, about 11, about 12, about 13, about 14, about 15, about 16, or more days prior to the first dose of the PD-1 inhibitor). In embodiments, the dose of the CAR-expressing cell is administered about 3-4 weeks before the first dose of the PD-1 inhibitor. In embodiments, the PD-1 inhibitor is administered every 2-4 weeks (e.g., every 2-3 weeks or 3-4 weeks, e.g., every 3 weeks) during the treatment interval). In embodiments, the PD-1 inhibitor is administered at a dose of about 1-3 mg/kg, e.g., about 2 mg/kg. In embodiments, the CAR-expressing cell is administered at a dose of about 1-10×10⁶ cells/kg, e.g., about 5×10⁶ cells/kg, e.g., about 5.3×10⁶ cells/kg. In embodiments, the CAR-expressing cell is administered at a dose of about 1-10×10⁸ cells per infusion, e.g., about 5×10⁸ cells per infusion.

[0050] In any of the methods described herein, the subject is administered a single dose of a CAR-expressing cell and a single dose of a PD-1 inhibitor. In one embodiment, the single dose of the CAR-expressing cell is administered at least 2 days, e.g., 2, 3, 4, 5, 6, 7, 8, 9, 10, 14, 15, 16, 17, 18, 20, 25, 30, 35, 40 days, or 2 weeks, 3 weeks, 4 weeks, or more, before administration of the single dose of the PD-1 inhibitor. In embodiments, the single dose of the CAR-expressing cell is administered about 35 days before administration of the PD-1 inhibitor.

[0051] In one embodiment, one or more, e.g., 1, 2, 3, 4, or 5, subsequent doses of a CAR-expressing cell are administered to the subject after the initial dose of the CAR-expressing cell. In one embodiment, the one or more subsequent doses of the CAR-expressing cell are administered at least 2 days, e.g., 2, 3, 4, 5, 6, 7, 8, 9, 10, 14, 20, 25, 30, 35, 40 days, or 2 weeks, 3 weeks, 4 weeks, or more, after the previous dose of the CAR-expressing cell. In one embodiment, the one or more subsequent doses of the CAR-expressing cell are administered at least 1 month, e.g., 1, 2, 3, 4, 5, 6, 7, 8, 9, 10, 11, 12, 13, 14, 15, 16, 17, 18, 19, 20 or more months, after the previous dose of the CAR-expressing cell. In one embodiment, the one or more subsequent doses of the CAR-expressing cell are administered at least 5 days after the previous dose of the CAR-expressing cell. In one embodiment, the subject is administered three doses of the CAR-expressing cell per week or one dose every 2 days.

[0052] In one embodiment, one or more, e.g., 1, 2, 3, 4, or 5, subsequent doses of PD-1 inhibitor are administered after administration of the single dose of the PD-1 inhibitor. In one embodiment, the one or more subsequent doses of the PD-1 inhibitor are administered at least 5 days, 7 days, 10 days, 14 days, 20 days, 25 days, 30 days, 2 weeks, 3 weeks, 4 weeks, or 5 weeks, e.g., 3 weeks, after the previous dose of PD-1 inhibitor.

[0053] In one embodiment, the one or more subsequent doses of the PD-1 inhibitor are administered at least 1, 2, 3, 4, 5, 6, or 7 days, after a dose of the CAR-expressing cell, e.g., the initial dose of the CAR-expressing cell.

[0054] In one embodiment, one or more, e.g., 1, 2, 3, 4, or 5, doses of the PD-1 inhibitor is administered prior to the first dose of the CAR-expressing cell.

[0055] In one embodiment, one or more, e.g., 1, 2, 3, 4, 5, or 6, doses of the PD-1 inhibitor is administered afer the first dose of the CAR-expressing cell, e.g., 2 days, 3 days, 4 days, 5 days, 6 days, 7 days, 2 weeks, 3 weeks, 4 weeks, 5 weeks, 6 weeks, 7 weeks, or 8 weeks after the first dose of the CAR-expressing cell. In one embodiment, the one or more, e.g., 1, 2, 3, 4, or 5, doses of the PD-1 inhibitor is administered after the first dose of the CAR-expresisng cells, e.g., 2, 3, 4, 5, 6, 7, 8, 9, 10, 11, 12, 13, 14, 15, 16, 17, 18, 19, or 20 months after the first dose of the CAR-expressing cell.

[0056] In one embodiment, one or more, e.g., 1, 2, 3, 4, 5, or 6, doses of the PD-1 inhibitor which is administered after the first dose of the CAR-expressing cell, is administered every 2-3 weeks, e.g., every 2, 3, 4, or 5 weeks, for at least 1 month, e.g., for 1, 2, 3, 4, 5, 6, 7, 8, 9, 10, 11, or 12 months or more. In one embodiment, the one or more doses of the PD-1 inhibitor are administered, e.g., about 2-4 weeks, e.g., 3 weeks after the previous dose of the PD-1 inhibitor, e.g., for up to six doses.

[0057] In one embodiment, the administration of the one or more doses of the CAR-expressing cell and the one or more doses of PD-1 inhibitor is repeated, e.g., 1, 2, 3, 4, or 5 more times.

[0058] In any of the methods described herein, in embodiments, the subject is further administered a chemotherapy, e.g., a chemotherapy described herein. In embodiments, the chemotherapy is administered before administration of the CAR-expressing cell. In embodiments, the chemotherapy is administered about 1-10 days (e.g., about 1-4, 1-5, 4-8, 4-10, or 5-10 days) before administration of the CAR-expressing cell.

[0059] Dosages and therapeutic regimens of the therapeutic agents disclosed herein can be determined by a skilled artisan.

[0060] In any of the administration regimens or treatment intervals described herein, in some embodiments, a dose of CAR-expressing cells (e.g., CD19 CAR-expressing cells) comprises about 10⁴ to about 10⁹ cells/kg, e.g., about 10⁴ to about 10⁵ cells/kg, about 10⁵ to about 10⁶ cells/kg, about 10⁶ to about 10⁷ cells/kg, about 10⁷ to about 10⁸ cells/kg, or about 10⁸ to about 10⁹ cells/kg; or at least about one of: 1×10⁷, 1.5×10⁷, 2×10⁷, 2.5×10⁷, 3×10⁷, 3.5×10⁷, 4×10⁷, 5×10⁷, 1×10⁸, 1.5×10⁸, 2×10⁸, 2.5×10⁸, 3×10⁸, 3.5×10⁸, 4×10⁸, 5×10⁸, 1×10⁹, 2×10⁹, or 5×10⁹ cells. In some embodiments, a dose of CAR-expressing cells (e.g., CD19 CAR-expressing cells) comprises at least about 1-5×10⁷ to 1-5×10⁸ CAR-expressing cells In some embodiments, the subject is administered about 1-5×10⁷ CAR-expressing cells (e.g., CD19 CAR-expressing cells). In other embodiments, the subject is administered about 1-5×10⁸ CAR-expressing cells (e.g., CD19 CAR-expressing cells).

[0061] In embodiments, the CAR-expressing cells (e.g., CD19 CAR-expressing cells) are administered to the subject according to a dosing regimen comprising a total dose of cells administered to the subject by dose fractionation, e.g., one, two, three or more separate administration of a partial dose. In embodiments, a first percentage of the total dose is administered on a first day of treatment, a second percentage of the total dose is administered on a subsequent (e.g., second, third, fourth, fifth, sixth, or seventh or later) day of treatment, and optionally, a third percentage (e.g., the remaining percentage) of the total dose is administered on a yet subsequent (e.g., third, fourth, fifth, sixth, seventh, eighth, ninth, tenth, or later) day of treatment. For example, 10% of the total dose of cells is delivered on the first day, 30% of the total dose of cells is delivered on the second day, and the remaining 60% of the total dose of cells is delivered on the third day of treatment. For example, a total cell dose includes 1 to 5×10⁷ or 1 to 5×10⁸ CAR-expressing cells (e.g., CD19 CAR-expressing cells).

[0062] In any of the administration regimens described herein, a dose of a PD-1 inhibitor, e.g., an anti-PD-1 antibody molecule described herein (e.g., pembrolizumab, nivolumab, PDR001, or an anti-PD-1 antibody molecule provided in Table 6), comprises about 1 to 30 mg/kg, e.g., about 1 to 20 mg/kg, about 2 to 15 mg/kg, about 5 to 25 mg/kg, about 10 to 20 mg/kg, about 1 to 5 mg/kg, about 2 mg/kg, about 3 mg/kg, or about 10 mg/kg. In one embodiment, the dose is about 10 to 20 mg/kg. In one embodiment, the dose is about 1 to 5 mg/kg. In one embodiment, the dose is less than 5 mg/kg, less than 4 mg/kg, less than 3 mg/kg, less than 2 mg/kg, or less than 1 mg/kg. In one embodiment, the dose is about 2 mg/kg.

[0063] In embodiments, in any of the administration regimens described herein, the dose of the PD-1 inhibitor is administered every 1-4 weeks, e.g., every week, every 2 weeks, every 3 weeks, or every 4 weeks.

[0064] In certain embodiments, the anti-PD-1 antibody molecule (e.g., pembrolizumab, nivolumab, PDR001, or an anti-PD-1 antibody molecule provided in Table 6) is administered by injection (e.g., subcutaneously or intravenously) at a dose of about 1 to 30 mg/kg, e.g., about 1 to 20 mg/kg, about 2 to 15 mg/kg, about 5 to 25 mg/kg, about 10 to 20 mg/kg, about 1 to 5 mg/kg, about 3 mg/kg, or about 2 mg/kg. The dosing schedule can vary from e.g., once a week to once every 2, 3, or 4 weeks. In one embodiment, the anti-PD-1 antibody molecule is administered at a dose from about 10 to 20 mg/kg every other week. In one embodiment, the dose is about 1 to 5 mg/kg every 2 weeks, every 3 weeks, or every 4 weeks. In one embodiment, the dose is less than 5 mg/kg, less than 4 mg/kg, less than 3 mg/kg, less than 2 mg/kg, or less than 1 mg/kg, every 2 weeks, every 3 weeks, or every 4 weeks. In one embodiment, the dose is about 2 mg/kg, every 2 weeks, every 3 weeks, or every 4 weeks.

[0065] In some embodiments, the dose of a PD-1 inhibitor, e.g., an anti-PD-1 antibody molecule (e.g., pembrolizumab, nivolumab, PDR001 or an anti-PD-1 antibody molecule provided in Table 6), is a flat dose. In some embodiments, the anti-PD-1 antibody molecule is administered by injection (e.g., subcutaneously or intravenously) at a dose (e.g., a flat dose) of about 200 mg to 500 mg, e.g., about 250 mg to 450 mg, about 300 mg to 400 mg, about 250 mg to 350 mg, about 350 mg to 450 mg, or about 200 mg, about 300 mg or about 400 mg. The dosing schedule (e.g., flat dosing schedule) can vary from, e.g., once a week to once every 2, 3, 4, 5, or 6 weeks. In one embodiment, the anti-PD-1 antibody molecule is administered at a dose from about 200 mg once every three weeks or once every four weeks. In one embodiment, the anti-PD-1 antibody molecule is administered at a dose from about 300 mg to 400 mg once every three weeks or once every four weeks. In one embodiment, the anti-PD-1 antibody molecule is administered at a dose from about 300 mg once every three weeks, e.g., via i.v. infusion. In one embodiment, the anti-PD-1 antibody molecule is administered at a dose from about 200 mg once every three weeks, e.g., via i.v. infusion. In one embodiment, the anti-PD-1 antibody molecule is administered at a dose from about 400 mg once every four weeks, e.g., via i.v. infusion. In one embodiment, the anti-PD-1 antibody molecule is administered at a dose from about 300 mg once every four weeks, e.g., via i.v. infusion. In one embodiment, the anti-PD-1 antibody molecule is administered at a dose from about 400 mg once every three weeks, e.g., via i.v. infusion.

[0066] In one embodiment, the PD-1 inhibitor is pembrolizumab administered at 200 mg every three weeks for up to six doses. In some embodiments, the PD-1 inhibitor is pembrolizumab administered at 300 mg every three weeks for up to six doses.

[0067] In one embodiment, the PD-1 inhibitor is selected from the group consisting of Nivolumab, Pembrolizumab, Pidilizumab, PDR001, AMP 514, AMP-224, and any anti-PD-1 antibody molecule provided in Table 6.

[0068] In some embodiments, the disclosure provides a method of treating a subject having a disease associated with expression of CD19, e.g., a hematologic cancer (e.g., DLBCL (e.g. primary DLBCL) or B-cell acute lymphoblastic leukemia (B-ALL)). The method comprises administering to the subject an effective number of a population of cells that express a CAR molecule that binds CD19, e.g., a CD19 CAR (“CD19 CAR therapy”) as described herein, in combination with a PD1 inhibitor, e.g., an anti-PD1 antibody as described herein. In some embodiments, the CD19 CAR therapy is administered prior to, simultaneously with or after the PD-1 inhibitor. In one embodiment, the CD19 CAR therapy is administered prior to the PD-1 inhibitor. For example, one or more doses of the PD-1 inhibitor can be administered post-CD19 CAR therapy (e.g., starting 5 days to 4 months, e.g., 10 day to 3 months, e.g., 14 days to 2 months post-CD19 CAR therapy). In some embodiments, the combination of the CD19 CAR therapy and PD-1 inhibitor therapy is repeated.

[0069] In one embodiment of the therapy comprising the CD19 CAR-expressing cell and the PD1 inhibitor, the CD19 CAR therapy comprises one or more treatments with cells that express a CD19 CAR as described herein. In embodiments, the CD19 CAR molecule comprises an antigen binding domain that binds specifically to CD19, e.g., as described herein. In embodiments, the CD19 CAR and PD-1 inhibitor therapies are administered at a dosage described herein.

[0070] In some embodiments, the CD19 CAR (or a nucleic acid encoding it) comprises a sequence set out in any of Table 2 or Table 3.

[0071] In embodiments of the therapy comprising the CD19 CAR-expressing cell and the PD1 inhibitor, the CD19 CAR therapy comprises one or more treatments with cells that express a murine CAR molecule described herein, e.g., a murine CD19 CAR molecule of Table 3 or having CDRs as set out in Tables 4 and 5. In embodiments, the CD19 CAR is CTL019, e.g., as described herein.

[0072] In another embodiment of the therapy comprising the CD19 CAR-expressing cell and the PD1 inhibitor, the CD19 CAR therapy comprises one or more treatments with cells that express a humanized CD19 CAR, e.g., a humanized CD19 CAR according to Table 2 or having CDRs as set out in Tables 4 and 5, e.g., CAR2 according to Table 2, e.g., CTL119.

[0073] In some embodiments, the CAR molecule comprises one, two, and/or three CDRs from the heavy chain variable region and/or one, two, and/or three CDRs from the light chain variable region of the murine or humanized CD19 CAR of Table 4 and 5.

[0074] In another embodiment of the therapy comprising the CD19 CAR-expressing cell and the PD1 inhibitor, the PD-1 inhibitor is an antibody to PD-1. In some embodiments, the PD-1 inhibitor is chosen from pembrolizumab, nivolumab, PDR001 (e.g., an antibody molecule of Table 6), MEDI-0680 (AMP-514), AMP-224, REGN-2810, or BGB-A317.

[0075] In one embodiment of the therapy comprising the CD19 CAR-expressing cell and the PD1 inhibitor, the PD-1 inhibitor is pembrolizumab. In one embodiment, the antibody molecule includes:
[0076] (i) a heavy chain variable (VH) region comprising the VHCDR1 amino acid sequence of SEQ ID NO: 503; the VHCDR2 amino acid sequence of SEQ ID NO: 504; and the VHCDR3 amino acid sequence of SEQ ID NO: 505; and
[0077] (ii) a light chain variable (VL) region comprising the VLCDR1 amino acid sequence of SEQ ID NO: 500; the VLCDR2 amino acid sequence of SEQ ID NO: 501; and rge VLCDR3 amino acid sequence of SEQ ID NO: 502,
   or an amino acid sequence at least 85%, 90%, 95% identical or higher.

[0078] In another embodiment of the therapy comprising the CD19 CAR-expressing cell and the PD1 inhibitor, the PD-1 inhibitor, e.g., the anti-PD-1 antibody molecule, includes at least one, two, three, four, five or six CDRs (or collectively all of the CDRs) from a heavy and light chain variable region from an antibody chosen from any of BAP049-hum01, BAP049-hum02, BAP049-hum03, BAP049-hum04, BAP049-hum05, BAP049-hum06, BAP049-hum07, BAP049-hum08, BAP049-hum09, BAP049-hum10, BAP049-hum11, BAP049-hum12, BAP049-hum13, BAP049-hum14, BAP049-hum15, BAP049-hum16, BAP049-Clone-A, BAP049-Clone-B, BAP049-Clone-C, BAP049-Clone-D, or BAP049-Clone-E; or as described in Table 1 of US 2015/0210769, or in Table 6 herein; or encoded by the nucleotide sequence in Table 1, or encoded by the nucleotide sequence in Table 6 herein, or a sequence substantially identical (e.g., at least 80%, 85%, 90%, 92%, 95%, 97%, 98%, 99% or higher identical) to any of the aforesaid sequences; or closely related CDRs, e.g., CDRs which are identical or which have at least one amino acid alteration, but not more than two, three or four alterations (e.g., substitutions, deletions, or insertions, e.g., conservative substitutions).

[0079] In yet another embodiment of the therapy comprising the CD19 CAR-expressing cell and the PD1 inhibitor, the PD-1 inhibitor, e.g., the anti-PD-1 antibody molecule, comprises at least one, two, three or four variable regions from an antibody described herein, e.g., an antibody chosen from any of BAP049-hum01, BAP049-hum02, BAP049-hum03, BAP049-hum04, BAP049-hum05, BAP049-hum06, BAP049-hum07, BAP049-hum08, BAP049-hum09, BAP049-hum10, BAP049-hum11, BAP049-hum12, BAP049-hum13, BAP049-hum14, BAP049-hum15, BAP049-hum16, BAP049-Clone-A, BAP049-Clone-B, BAP049-Clone-C, BAP049-Clone-D, or BAP049-Clone-E; or as described in Table 1 of US 2015/0210769, or in Table 6 herein; or encoded by the nucleotide sequence in Table 1; or encoded by the nucleotide sequence in Table 6 herein, or a sequence substantially identical (e.g., at least 80%, 85%, 90%, 92%, 95%, 97%, 98%, 99% or higher identical) to any of the aforesaid sequences.

[0080] In embodiments, the PD-1 inhibitor, e.g., anti-PD-1 antibody molecule, is PDR-001, which contains the variable light chain and variable heavy chain amino acid sequences of BAP049-Clone-E, as described in Table 6.

[0081] In one embodiment of the therapy comprising the CD19 CAR-expressing cell and the PD1 inhibitor, the PD-1 inhibitor, e.g., pembrolizumab, is administered post-CD19 CAR therapy (e.g., starting 5 days to 4 months, e.g., 10 day to 3 months, e.g., 14 days to 2 months post-CTL019 or post-CTL119 therapy, or post- a combination of CTL019 and CTL119 therapies). In embodiments, administration of the therapy is to a subject with B-ALL, e.g., relapsed or refractory B-ALL.

[0082] In yet another embodiment of the therapy comprising the CD19 CAR-expressing cell and the PD1 inhibitor, the hematologic cancer is B-ALL or DLBCL, e.g., relapsed or refractory B-ALL or DLBCL. In one embodiment, the subject has a hematologic malignancy, e.g., B-ALL or DLBCL, and may not respond to the CAR T therapy or may relapse, e.g., due to poor CAR T cell persistence. In one embodiment of the CD19 CAR therapy-PD1 inhibitor therapy, the subject shows an improved therapeutic outcome, e.g., the subject achieves one or more of partial remission, complete remission, or prolonged CAR T cell persistence, in response to the CD19 CAR therapy-PD1 inhibitor therapy, e.g., one or more cycles of the CD19 CAR therapy-PD1 inhibitor therapy.

[0083] In one embodiment of the therapy comprising the CD19 CAR-expressing cell and the PD1 inhibitor, prior to administration of the PD-1 inhibitor, the subject has relapsed or refractory B-ALL or DLBCL to a prior treatment with a CD19 CAR therapy, e.g., a prior treatment with one or both of CTL019 and CTL119. In some embodiments, the subject shows decreased or poor CAR T cell persistence. In some embodiments, the subject is, or has been treated with CTL019 followed by CTL119.

[0084] In some embodiments, the subject shows CD19+ relapse. In some embodiments, the subject has relapsed or refractory CD19+ B-ALL. In some embodiments, the subject has relapsed or refractory CD19+ DLBCL. In one embodiment, the subject has relapsed or refractory B-ALL with lymph node involvement, e.g., has lymphomatous disease.

[0085] In some embodiments, the subject that has relapsed or refractory B-ALL with lymph node involvement, e.g., has lymphomatous disease, to a prior treatment with a CD19 CAR therapy, shows decreased PET-avid lesions, e.g., shows a reduced number of or intensity of lesions, in response to the CD19 CAR therapy-PD1 inhibitor therapy, e.g., in response to one or more cycles of the CD19 CAR therapy-PD1 inhibitor therapy.

[0086] In some embodiments, the subject, e.g., a subject showing CD19+ relapse after a CD19CAR therapy, is administered a further CD19 CAR therapy, in combination with the PD-1 inhibitor, e.g., pembrolizumab. In embodiments, the further administration of the combination therapy results in an improved therapeutic outcome, e.g., the subject achieves one or more of partial remission, complete remission, or a prolonged CAR T cell persistence. In an embodiment, the administration of the combination therapy results in prolonged persistence of a CAR T cell, e.g., a CD19 CAR-expressing cell. In an embodiment, the administration of the combination therapy results in a longer time for B cell recovery, e.g., longer time prior to B cell aplasia, e.g., compared to a subject treated with CD19 CAR therapy alone. In some embodiments, the subject after treatment with the combination disclosed herein has one or more of: (i) a decreased risk of relapse, (ii) delayed timing of the onset of relapse, or (iii) decreased severity of relapse, e.g., compared to a subject treated with CD19 CAR therapy alone. In an embodiment, administration of the combination therapy results in an objective clinical response.

[0087] In an embodiment, the subject, e.g., a subject showing relapse after a CD19 CAR therapy, is eligible to receive repeat administration of a CD19 CAR therapy, e.g., a second, third or fourth dose. In an embodiment, the subject is eligible to receive a repeat administration of a CD19 CAR therapy, e.g., a second, third or fourth dose, along with a PD-1 inhibitor. In an embodiment, a subject showing low persistence of CD19 CAR therapy after a first administration of a CD19 CAR therapy is eligible to receive a repeat administration of a CD19 CAR therapy, e.g., a second, third or fourth dose, along with a PD-1 inhibitor.

[0088] Optionally, the subject has, or is identified as having, at least 5%, 6%, 7%, 8%, 9%, 10%, 20%, 30%, 40%, 50%, 60%, 70%, 80%, or 90% of cancer cells, e.g., DLBCL cells, which are CD3+/PD1+.

[0089] In another aspect, the disclosure features a composition (e.g., one or more dosage formulations, combinations, or one or more pharmaceutical compositions) comprising a cell expressing a CAR (e.g., CD19 CAR) described herein and a PD-1 inhibitor described herein. In one embodiment, the CAR (e.g., CD19 CAR) comprises an antigen binding domain (e.g., CD19 antigen binding domain), a transmembrane domain, and an intracellular signaling domain, as described herein. In one embodiment, the CD19 CAR comprises a CD19 antigen binding domain listed in Table 2 or 3. In one embodiment, the PD-1 inhibitor comprises an antibody molecule, a small molecule, a polypeptide, e.g., a fusion protein, or an inhibitory nucleic acid, e.g., a siRNA or shRNA. In one embodiment, the PD-1 inhibitor comprises an antibody molecule, e.g., pembrolizumab, nivolumab, PDR001 or an antibody molecule listed in Table 6. The CAR-expressing cell and the PD-1 inhibitor can be in the same or different formulation or pharmaceutical composition.

[0090] In another aspect, the disclosure features a composition (e.g., one or more dosage formulations, combinations, or one or more pharmaceutical compositions) comprising a cell expressing a CAR (e.g., CD19 CAR) described herein and a PD-1 inhibitor described herein, for use in a method of treating a disease (e.g., cancer), e.g., disease associated with expression of CD19, e.g., a cancer described herein. In one embodiment, the CAR (e.g., CD19 CAR) comprises an antigen binding domain (e.g., CD19 antigen binding domain), a transmembrane domain, and an intracellular signaling domain, as described herein. In one embodiment, the CD19 CAR comprises a CD19 antigen binding domain listed in Table 2 or 3. In one embodiment, the PD-1 inhibitor comprises an antibody molecule, a small molecule, a polypeptide, e.g., a fusion protein, or an inhibitory nucleic acid, e.g., a siRNA or shRNA. In one embodiment, the PD-1 inhibitor comprises an antibody molecule, e.g., pembrolizumab, nivolumab, PDR001, or an antibody molecule listed in Table 6. The CAR-expressing cell and the PD-1 inhibitor can be in the same or different formulation or pharmaceutical composition.

### PD-1 Inhibitors

[0091] Provided herein are PD-1 inhibitors for use in any of the methods or compositions described herein. In any of the methods or compositions described herein, the PD-1 inhibitor comprises an antibody molecule, a small molecule, a polypeptide, e.g., a fusion protein, or an inhibitory nucleic acid, e.g., a siRNA or shRNA.

[0092] In one embodiment, the PD-1 inhibitor is characterized by one or more of the following: inhibits or reduces PD-1 expression, e.g., transcription or translation of PD-1; inhibits or reduces PD-1 activity, e.g., inhibits or reduces binding of PD-1 to its ligand, e.g., PD-L1; or binds to PD-1 or its ligand, e.g., PD-L1.

[0093] In one embodiment, the PD-1 inhibitor is an antibody molecule.

[0094] In one embodiment, the PD-1 inhibitor comprises an anti-PD-1 antibody molecule comprising a heavy chain complementary determining region 1 (HC CDR1), a heavy chain complementary determining region 2 (HC CDR2), and a heavy chain complementary determining region 3 (HC CDR3) of any PD-1 antibody molecule amino acid sequence listed in Table 6; and/or a light chain complementary determining region 1 (LC CDR1), a light chain complementary determining region 2 (LC CDR2), and a light chain complementary determining region 3 (LC CDR3) of any PD-1 antibody molecule amino acid sequence listed in Table 6. In one embodiment, the anti-PD1 antibody molecule comprises a HC CDR1 amino acid sequence chosen from SEQ ID NO: 137 or 140, a HC CDR2 amino acid sequence of SEQ ID NO: 138 or 141, and a HC CDR3 amino acid sequence of SEQ ID NO: 139; and/or a LC CDR1 amino acid sequence of SEQ ID NO: 146 or 149, a LC CDR2 amino acid sequence of SEQ ID NO: 147 or 150, and a LC CDR3 amino acid sequence of SEQ ID NO: 148, 151, 166, or 167. In one embodiment, the anti-PD-1 antibody comprises a HC CDR1 amino acid sequence chosen from SEQ ID NO: 137 or 140, a HC CDR2 amino acid sequence of SEQ ID NO: 138 or 141, and a HC CDR3 amino acid sequence of SEQ ID NO: 139; and/or a LC CDR1 amino acid sequence of SEQ ID NO: 146 or 149, a LC CDR2 amino acid sequence of SEQ ID NO: 147 or 150, and a LC CDR3 amino acid sequence of SEQ ID NO: 166 or 167.

[0095] In one embodiment, the anti-PD-1 antibody molecule comprises a heavy chain variable region comprising the amino acid sequence of any heavy chain variable region listed in Table 6, e.g., SEQ ID NOs: 142, 144, 154, 158, 154, 158, 172, 184, 216, or 220. In one embodiment, the anti-PD-1 antibody molecule comprises a heavy chain variable region comprising the amino acid sequence having at least one, two or three modifications but not more than 30, 20 or 10 modifications to the amino acid sequence of any heavy chain variable region provided in Table 6, e.g., SEQ ID NOs: 142, 144, 154, 158, 154, 158, 172, 184, 216, or 220. In one embodiment, the anti-PD-1 antibody molecule comprises a heavy chain variable region comprising an amino acid sequence at least 95% identical (e.g., with 95-99% identity) to the amino acid sequence of any heavy chain variable region provided in Table 6, e.g., SEQ ID NOs: 142, 144, 154, 158, 154, 158, 172, 184, 216, or 220.

[0096] In one embodiment, the anti-PD-1 antibody molecule comprises a heavy chain comprising the amino acid sequence of any heavy chain listed in Table 6, e.g., SEQ ID NOs:156, 160, 174, 186, 218, 222, 225, or 236. In one embodiment, the anti-PD-1 antibody molecule comprises a heavy chain comprising the amino acid sequence having at least one, two or three modifications but not more than 30, 20 or 10 modifications to any heavy chain listed in Table 6, e.g., SEQ ID NOs: 156, 160, 174, 186, 218, 222, 225, or 236. In one embodiment, the anti-PD-1 antibody molecule comprises a heavy chain comprising an amino acid sequence with 95-99% identity to the amino acid sequence of any heavy chain listed in Table 6, e.g., SEQ ID NOs: 156, 160, 174, 186, 218, 222, 225, or 236.

[0097] In one embodiment, the anti-PD-1 antibody molecule comprises a light chain variable region comprising the amino acid sequence of any light chain variable region listed in Table 6, e.g., SEQ ID NOs: 152, 162, 168, 176, 180, 188, 192, 196, 200, 204, 208, or 212. In one embodiment, the anti-PD-1 antibody molecule comprises a light chain variable region comprising the amino acid sequence having at least one, two or three modifications but not more than 30, 20 or 10 modifications to the amino acid sequence of any light chain variable region provided in Table 6, e.g., SEQ ID NOs: 152, 162, 168, 176, 180, 188, 192, 196, 200, 204, 208, or 212. In one embodiment, the anti-PD-1 antibody molecule comprises a light chain variable region comprising an amino acid sequence at least 95% identical (e.g., with 95-99% identity) to the amino acid sequence of any light chain variable region provided in Table 6, e.g., SEQ ID NOs: 152, 162, 168, 176, 180, 188, 192, 196, 200, 204, 208, or 212.

[0098] In one embodiment, the anti-PD-1 antibody molecule comprises a light chain comprising the amino acid sequence of any light chain listed in Table 6, e.g., SEQ ID NOs: 164, 170, 178, 182, 190, 194, 198, 202, 206, 210, or 214. In one embodiment, the anti-PD-1 antibody molecule comprises a light chain comprising the amino acid sequence having at least one, two or three modifications but not more than 30, 20 or 10 modifications to any light chain listed in Table 6, e.g., SEQ ID NOs: 164, 170, 178, 182, 190, 194, 198, 202, 206, 210, or 214. In one embodiment, the anti-PD-1 antibody molecule comprises a light chain comprising an amino acid sequence at least 95% identical (e.g., with 95-99% identity) to the amino acid sequence to any any light chain listed in Table 6, e.g., SEQ ID NOs: 164, 170, 178, 182, 190, 194, 198, 202, 206, 210, or 214.

[0099] In one embodiment, the anti-PD-1 antibody molecule comprises:
[0100] i) a heavy chain comprising the amino acid sequence of SEQ ID NO: 144 and a light chain comprising the amino acid sequence of SEQ ID NO: 152;
[0101] ii) a heavy chain comprising the amino acid sequence of SEQ ID NO: 156 or 160 and a light chain comprising the amino acid sequence of SEQ ID NO: 164;
[0102] iii) a heavy chain comprising the amino acid sequence of SEQ ID NO: 156 or 160 and a light chain comprising the amino acid sequence of SEQ ID NO: 170.
[0103] iv) a heavy chain comprising the amino acid sequence of SEQ ID NO: 174 and a light chain comprising the amino acid sequence of SEQ ID NO: 178;
[0104] v) a heavy chain comprising the amino acid sequence of SEQ ID NO: 174 and a light chain comprising the amino acid sequence of SEQ ID NO: 182;
[0105] vi) a heavy chain comprising the amino acid sequence of SEQ ID NO: 186 and a light chain comprising the amino acid sequence of SEQ ID NO: 182;
[0106] vii) a heavy chain comprising the amino acid sequence of SEQ ID NO: 186 and a light chain comprising the amino acid sequence of SEQ ID NO: 190;
[0107] viii) a heavy chain comprising the amino acid sequence of SEQ ID NO: 174 and a light chain comprising the amino acid sequence of SEQ ID NO: 190;
[0108] ix) a heavy chain comprising the amino acid sequence of SEQ ID NO: 174 and a light chain comprising the amino acid sequence of SEQ ID NO: 194;
[0109] x) a heavy chain comprising the amino acid sequence of SEQ ID NO: 174 and a light chain comprising the amino acid sequence of SEQ ID NO: 198;
[0110] xi) a heavy chain comprising the amino acid sequence of SEQ ID NO: 186 and a light chain comprising the amino acid sequence of SEQ ID NO: 202;
[0111] xii) a heavy chain comprising the amino acid sequence of SEQ ID NO: 174 and a light chain comprising the amino acid sequence of SEQ ID NO: 202;
[0112] xiii) a heavy chain comprising the amino acid sequence of SEQ ID NO: 186 and a light chain comprising the amino acid sequence of SEQ ID NO: 206;
[0113] xiv) a heavy chain comprising the amino acid sequence of SEQ ID NO: 174 and a light chain comprising the amino acid sequence of SEQ ID NO: 206;
[0114] xv) a heavy chain comprising the amino acid sequence of SEQ ID NO: 174 and a light chain comprising the amino acid sequence of SEQ ID NO: 210;
[0115] xvi) a heavy chain comprising the amino acid sequence of SEQ ID NO: 174 and a light chain comprising the amino acid sequence of SEQ ID NO: 214;
[0116] xvii) a heavy chain comprising the amino acid sequence of SEQ ID NO: 218 and a light chain comprising the amino acid sequence of SEQ ID NO: 206;
[0117] xviii) a heavy chain comprising the amino acid sequence of SEQ ID NO: 218 and a light chain comprising the amino acid sequence of SEQ ID NO: 202;
[0118] xix) a heavy chain comprising the amino acid sequence of SEQ ID NO: 222 and a light chain comprising the amino acid sequence of SEQ ID NO: 202;
[0119] xx) a heavy chain comprising the amino acid sequence of SEQ ID NO: 225 and a light chain comprising the amino acid sequence of SEQ ID NO: 178;
[0120] xxi) a heavy chain comprising the amino acid sequence of SEQ ID NO: 225 and a light chain comprising the amino acid sequence of SEQ ID NO: 190;
[0121] xxii) a heavy chain comprising the amino acid sequence of SEQ ID NO: 225 and a light chain comprising the amino acid sequence of SEQ ID NO: 202;
[0122] xxiii) a heavy chain comprising the amino acid sequence of SEQ ID NO: 236 and a light chain comprising the amino acid sequence of SEQ ID NO: 206; or
[0123] xxiv) a heavy chain comprising the amino acid sequence of SEQ ID NO: 225 and a light chain comprising the amino acid sequence of SEQ ID NO: 206.

[0124] In one embodiment, the anti-PD-1 antibody molecule comprises:
[0125] i) a heavy chain variable domain comprising the amino acid sequence of SEQ ID NO: 172 and a light chain variable domain comprising the amino acid sequence of SEQ ID NO: 204;
[0126] ii) a heavy chain variable domain comprising the amino acid sequence of SEQ ID NO: 142 or 144 and a light chain variable domain comprising the amino acid sequence of SEQ ID NO: 152;
[0127] iii) a heavy chain variable domain comprising the amino acid sequence of SEQ ID NO: 154 or 158 and a light chain variable domain comprising the amino acid sequence of SEQ ID NO: 162;
[0128] iv) a heavy chain variable domain comprising the amino acid sequence of SEQ ID NO: 154 or 158 and a light chain variable domain comprising the amino acid sequence of SEQ ID NO: 168;
[0129] v) a heavy chain variable domain comprising the amino acid sequence of SEQ ID NO: 172 and a light chain variable domain comprising the amino acid sequence of SEQ ID NO: 176;
[0130] vi) a heavy chain variable domain comprising the amino acid sequence of SEQ ID NO: 172 and a light chain variable domain comprising the amino acid sequence of SEQ ID NO: 180;
[0131] vii) a heavy chain variable domain comprising the amino acid sequence of SEQ ID NO: 184 and a light chain variable domain comprising the amino acid sequence of SEQ ID NO: 180;
[0132] viii) a heavy chain variable domain comprising the amino acid sequence of SEQ ID NO: 184 and a light chain variable domain comprising the amino acid sequence of SEQ ID NO: 188;
[0133] ix) a heavy chain variable domain comprising the amino acid sequence of SEQ ID NO: 172 and a light chain variable domain comprising the amino acid sequence of SEQ ID NO: 188;
[0134] x) a heavy chain variable domain comprising the amino acid sequence of SEQ ID NO: 172 and a light chain variable domain comprising the amino acid sequence of SEQ ID NO: 192;
[0135] xi) a heavy chain variable domain comprising the amino acid sequence of SEQ ID NO: 172 and a light chain variable domain comprising the amino acid sequence of SEQ ID NO: 196;
[0136] xii) a heavy chain variable domain comprising the amino acid sequence of SEQ ID NO: 184 and a light chain variable domain comprising the amino acid sequence of SEQ ID NO: 200;
[0137] xiii) a heavy chain variable domain comprising the amino acid sequence of SEQ ID NO: 172 and a light chain variable domain comprising the amino acid sequence of SEQ ID NO: 200;
[0138] xiv) a heavy chain variable domain comprising the amino acid sequence of SEQ ID NO: 184 and a light chain variable domain comprising the amino acid sequence of SEQ ID NO: 204;
[0139] xv) a heavy chain variable domain comprising the amino acid sequence of SEQ ID NO: 172 and a light chain variable domain comprising the amino acid sequence of SEQ ID NO: 204;
[0140] xvi) a heavy chain variable domain comprising the amino acid sequence of SEQ ID NO: 172 and a light chain variable domain comprising the amino acid sequence of SEQ ID NO: 208;
[0141] xvii) a heavy chain variable domain comprising the amino acid sequence of SEQ ID NO: 172 and a light chain variable domain comprising the amino acid sequence of SEQ ID NO: 212;
[0142] xviii) a heavy chain variable domain comprising the amino acid sequence of SEQ ID NO: 216 and a light chain variable domain comprising the amino acid sequence of SEQ ID NO: 204;
[0143] xix) a heavy chain variable domain comprising the amino acid sequence of SEQ ID NO: 216 and a light chain variable domain comprising the amino acid sequence of SEQ ID NO: 200;
[0144] xx) a heavy chain variable domain comprising the amino acid sequence of SEQ ID NO: 220 and a light chain variable domain comprising the amino acid sequence of SEQ ID NO: 200;
[0145] xxi) a heavy chain variable domain comprising the amino acid sequence of SEQ ID NO: 172 and a light chain variable domain comprising the amino acid sequence of SEQ ID NO: 176;
[0146] xxii) a heavy chain variable domain comprising the amino acid sequence of SEQ ID NO: 172 and a light chain variable domain comprising the amino acid sequence of SEQ ID NO: 188;
[0147] xxiii) a heavy chain variable domain comprising the amino acid sequence of SEQ ID NO: 172 and a light chain variable domain comprising the amino acid sequence of SEQ ID NO: 200; or
[0148] xxiv) a heavy chain variable domain comprising the amino acid sequence of SEQ ID NO: 184 and a light chain variable domain comprising the amino acid sequence of SEQ ID NO: 204.

[0149] In one embodiment, the anti-PD-1 antibody molecule includes at least one or two heavy chain variable domain (optionally including a constant region), at least one or two light chain variable domain (optionally including a constant region), or both, comprising the amino acid sequence of BAP049-Clone-A, BAP049-Clone-B, BAP049-Clone-C, BAP049-Clone-D, or BAP049-Clone-E; or as described in Table 1 of US 2015/0210769, or in Table 6 herein, or encoded by the nucleotide sequence in Table 6; or a sequence substantially identical (e.g., at least 80%, 85%, 90%, 92%, 95%, 97%, 98%, 99% or higher identical) to any of the aforesaid sequences. The anti-PD-1 antibody molecule, optionally, comprises a leader sequence from a heavy chain, a light chain, or both, as shown in Table 4 of US 2015/0210769; or a sequence substantially identical thereto.

[0150] In yet another embodiment, the anti-PD-1 antibody molecule includes at least one, two, or three complementarity determining regions (CDRs) from a heavy chain variable region and/or a light chain variable region of an antibody described herein, e.g., an antibody chosen from any of BAP049-hum01, BAP049-hum02, BAP049-hum03, BAP049-hum04, BAP049-hum05, BAP049-hum06, BAP049-hum07, BAP049-hum08, BAP049-hum09, BAP049-hum10, BAP049-hum11, BAP049-hum12, BAP049-hum13, BAP049-hum14, BAP049-hum15, BAP049-hum16, BAP049-Clone-A, BAP049-Clone-B, BAP049-Clone-C, BAP049-Clone-D, or BAP049-Clone-E; or as described in Table 6, or encoded by the nucleotide sequence in Table 6; or a sequence substantially identical (e.g., at least 80%, 85%, 90%, 92%, 95%, 97%, 98%, 99% or higher identical) to any of the aforesaid sequences.

[0151] In yet another embodiment, the anti-PD-1 antibody molecule includes at least one, two, or three CDRs (or collectively all of the CDRs) from a heavy chain variable region comprising an amino acid sequence shown in Table 1 of US 2015/0210769, or in Table 6 herein, or encoded by a nucleotide sequence shown in Table 6. In one embodiment, one or more of the CDRs (or collectively all of the CDRs) have one, two, three, four, five, six or more changes, e.g., amino acid substitutions or deletions, relative to the amino acid sequence shown in Table 6, or encoded by a nucleotide sequence shown in Table 6.

[0152] In yet another embodiment, the anti-PD-1 antibody molecule includes at least one, two, or three CDRs (or collectively all of the CDRs) from a light chain variable region comprising an amino acid sequence shown in Table 1 of US 2015/0210769, or in Table 6 herein, or encoded by a nucleotide sequence shown in Table 6. In one embodiment, one or more of the CDRs (or collectively all of the CDRs) have one, two, three, four, five, six or more changes, e.g., amino acid substitutions or deletions, relative to the amino acid sequence shown in Table 6, or encoded by a nucleotide sequence shown in Table 6. In certain embodiments, the anti-PD-1 antibody molecule includes a substitution in a light chain CDR, e.g., one or more substitutions in a CDR1, CDR2 and/or CDR3 of the light chain. In one embodiment, the anti-PD-1 antibody molecule includes a substitution in the light chain CDR3 at position 102 of the light variable region, e.g., a substitution of a cysteine to tyrosine, or a cysteine to serine residue, at position 102 of the light variable region according to Table 6 (e.g., SEQ ID NO: 152 or 162 for murine or chimeric, unmodified; or any of SEQ ID NOs: 168, 176, 180, 188, 192, 196, 200, 204, 208, or 212 for a modified sequence).

[0153] In another embodiment, the anti-PD-1 antibody molecule includes at least one, two, three, four, five or six CDRs (or collectively all of the CDRs) from a heavy and light chain variable region comprising an amino acid sequence shown in Table 1 of US 2015/0210769, or in Table 6 herein, or encoded by a nucleotide sequence shown in Table 6. In one embodiment, one or more of the CDRs (or collectively all of the CDRs) have one, two, three, four, five, six or more changes, e.g., amino acid substitutions or deletions, relative to the amino acid sequence shown in Table 6, or encoded by a nucleotide sequence shown in Table 6.

[0154] In one embodiment, the anti-PD-1 antibody molecule includes:

[0155] (a) a heavy chain variable region (VH) comprising a VHCDR1 amino acid sequence of SEQ ID NO: 140, a VHCDR2 amino acid sequence of SEQ ID NO: 141, and a VHCDR3 amino acid sequence of SEQ ID NO: 139; and a light chain variable region (VL) comprising a VLCDR1 amino acid sequence of SEQ ID NO: 149, a VLCDR2 amino acid sequence of SEQ ID NO: 150, and a VLCDR3 amino acid sequence of SEQ ID NO: 167, each disclosed in Table 1 of US 2015/0210769, or in Table 6 herein;

[0156] (b) a VH comprising a VHCDR1 amino acid sequence chosen from SEQ ID NO: 137; a

[0157] VHCDR2 amino acid sequence of SEQ ID NO: 138; and a VHCDR3 amino acid sequence of SEQ ID NO: 139; and a VL comprising a VLCDR1 amino acid sequence of SEQ ID NO: 146, a VLCDR2 amino acid sequence of SEQ ID NO: 147, and a VLCDR3 amino acid sequence of SEQ ID NO: 166, each disclosed in Table 1 of US 2015/0210769, or in Table 6 herein;

[0158] (c) a VH comprising a VHCDR1 amino acid sequence of SEQ ID NO: 286, a VHCDR2 amino acid sequence of SEQ ID NO: 141, and a VHCDR3 amino acid sequence of SEQ ID NO: 139; and a VL comprising a VLCDR1 amino acid sequence of SEQ ID NO: 149, a VLCDR2 amino acid sequence of SEQ ID NO: 150, and a VLCDR3 amino acid sequence of SEQ ID NO: 167, each disclosed in Table 1 of US 2015/0210769, or in Table 6 herein; or

[0159] (d) a VH comprising a VHCDR1 amino acid sequence of SEQ ID NO: 286; a VHCDR2 amino acid sequence of SEQ ID NO: 138; and a VHCDR3 amino acid sequence of SEQ ID NO: 139; and a VL comprising a VLCDR1 amino acid sequence of SEQ ID NO: 146, a VLCDR2 amino acid sequence of SEQ ID NO: 147, and a VLCDR3 amino acid sequence of SEQ ID NO: 166, each disclosed in Table 1 of US 2015/0210769, or in Table 6 herein.

[0160] In the combinations herein below, in another embodiment, the anti-PD-1 antibody molecule comprises (i) a heavy chain variable region (VH) comprising a VHCDR1 amino acid sequence chosen from SEQ ID NO: 137, SEQ ID NO: 140, or SEQ ID NO: 286; a VHCDR2 amino acid sequence of SEQ ID NO: 138 or SEQ ID NO: 141; and a VHCDR3 amino acid sequence of SEQ ID NO: 139; and (ii) a light chain variable region (VL) comprising a VLCDR1 amino acid sequence of SEQ ID NO: 146 or SEQ ID NO: 149, a VLCDR2 amino acid sequence of SEQ ID NO: 147 or SEQ ID NO: 150, and a VLCDR3 amino acid sequence of SEQ ID NO: 166 or SEQ ID NO: 167, each disclosed in Table 1 of US 2015/0210769, or in Table 6 herein.

[0161] In embodiments, the PD-1 inhibitor, e.g., anti-PD-1 antibody molecule, is PDR-001, which contains the variable light chain and variable heavy chain amino acid sequences of BAP049-Clone-E, as described in Table 6. In one embodiment, the anti-PD-1 antibody molecule comprises a heavy chain variable domain comprising the amino acid sequence of SEQ ID NO: 172 and a light chain variable domain comprising the amino acid sequence of SEQ ID NO: 204.

[0162] In some embodiments, the PD-1 inhibitor is chosen from Nivolumab, Pembrolizumab, Pidilizumab, AMP 514, AMP-224, or an anti-PD1 antibody described in U.S. Pat. No. 8,609,089, US 2010028330, and/or US 20120114649, each of which is incorporated herein by reference in its entirety.

[0163] In one embodiment, the PD-1 inhibitor is pembrolizumab. In one embodiment, the antibody molecule includes:
[0164] (i) a heavy chain variable (VH) region comprising the VHCDR1 amino acid sequence of SEQ ID NO: 503; the VHCDR2 amino acid sequence of SEQ ID NO: 504; and the VHCDR3 amino acid sequence of SEQ ID NO: 505; and
[0165] (ii) a light chain variable (VL) region comprising the VLCDR1 amino acid sequence of SEQ ID NO: 500; the VLCDR2 amino acid sequence of SEQ ID NO: 501; and rge VLCDR3 amino acid sequence of SEQ ID NO: 502,
   or an amino acid sequence at least 85%, 90%, 95% identical or higher.

### CAR-Expressing Cells

[0166] Provided herein are cells, e.g., immune effector cells, that express a chimeric antigen receptor (CAR) that targets, e.g., specifically binds to, an antigen (e.g., CD19), for use in any of the methods or compositions described herein. The CAR that specifically binds to antigen X is also referred to herein as an “X CAR”. For example, the CAR that specifically binds to CD19 also referred to herein as “a CD19 CAR”. The CAR (e.g., CD19 CAR) expressed by the CAR-expressing cell (e.g., CD19 CAR-expressing cell) described herein includes an antigen binding domain (e.g., CD19 binding domain), a transmembrane domain, and an intracellular signaling domain. In one embodiment, the intracellular signaling domain comprises a costimulatory domain and/or a primary signaling domain.

[0167] In embodiments, the CAR molecule comprises an antigen binding domain, transmembrane domain, and an intracellular signaling domain (e.g., an intracellular signaling domain comprising a costimulatory domain and/or a primary signaling domain).

[0168] In one embodiment, the CAR molecule comprises an antigen binding domain that is capable of binding an antigen described herein, e.g., a tumor antigen, e.g., chosen from one or more of the following: CD19; CD123; CD22; CD30; CD171; CS-1 (also referred to as CD2 subset 1, CRACC, SLAMF7, CD319, and 19A24); C-type lectin-like molecule-1 (CLL-1 or CLECL1); CD33; epidermal growth factor receptor variant III (EGFRvIII); ganglioside G2 (GD2); ganglioside GD3 (aNeu5Ac(2-8)aNeu5Ac(2-3)bDGaip(1-4)bDGicp(1-1)Cer); TNF receptor family member B cell maturation (BCMA); Tn antigen ((Tn Ag) or (GalNAcα-Ser/Thr)); prostate-specific membrane antigen (PSMA); Receptor tyrosine kinase-like orphan receptor 1 (ROR1); Fms-Like Tyrosine Kinase 3 (FLT3); Tumor-associated glycoprotein 72 (TAG72); CD38; CD44v6; Carcinoembryonic antigen (CEA); Epithelial cell adhesion molecule (EPCAM); B7H3 (CD276); KIT (CD117); Interleukin-13 receptor subunit alpha-2 (IL-13Ra2 or CD213A2); Mesothelin; Interleukin 11 receptor alpha (IL-11Ra); prostate stem cell antigen (PSCA); Protease Serine 21 (Testisin or PRSS21); vascular endothelial growth factor receptor 2 (VEGFR2); Lewis(Y) antigen; CD24; Platelet-derived growth factor receptor beta (PDGFR-beta); Stage-specific embryonic antigen-4 (SSEA-4); CD20; Folate receptor alpha; Receptor tyrosine-protein kinase ERBB2 (Her2/neu); Mucin 1, cell surface associated (MUC1); epidermal growth factor receptor (EGFR); neural cell adhesion molecule (NCAM); Prostase; prostatic acid phosphatase (PAP); elongation factor 2 mutated (ELF2M); Ephrin B2; fibroblast activation protein alpha (FAP); insulin-like growth factor 1 receptor (IGF-I receptor), carbonic anhydrase IX (CAIX); Proteasome (Prosome, Macropain) Subunit, Beta Type, 9 (LMP2); glycoprotein 100 (gp100); oncogene fusion protein consisting of breakpoint cluster region (BCR) and Abelson murine leukemia viral oncogene homolog 1 (Abl) (bcr-abl); tyrosinase; ephrin type-A receptor 2 (EphA2); Fucosyl GM1; sialyl Lewis adhesion molecule (sLe); ganglioside GM3 (aNeu5Ac(2-3)bDGalp(1-4)bDGicp(1-1)Cer); transglutaminase 5 (TGS5); high molecular weight-melanoma-associated antigen (HMWMAA); o-acetyl-GD2 ganglioside (OAcGD2); Folate receptor beta; tumor endothelial marker 1 (TEM1/CD248); tumor endothelial marker 7-related (TEM7R); claudin 6 (CLDN6); thyroid stimulating hormone receptor (TSHR); G protein-coupled receptor class C group 5, member D (GPRCSD); chromosome X open reading frame 61 (CXORF61); CD97; CD179a; anaplastic lymphoma kinase (ALK); Polysialic acid; placenta-specific 1 (PLAC1); hexasaccharide portion of globoH glycoceramide (GloboH); mammary gland differentiation antigen (NY-BR-1); uroplakin 2 (UPK2); Hepatitis A virus cellular receptor 1 (HAVCR1); adrenoceptor beta 3 (ADRB3); pannexin 3 (PANX3); G protein-coupled receptor 20 (GPR20); lymphocyte antigen 6 complex, locus K 9 (LY6K); Olfactory receptor 51E2 (OR51E2); TCR Gamma Alternate Reading Frame Protein (TARP); Wilms tumor protein (WT1); Cancer/testis antigen 1 (NY-ESO-1); Cancer/testis antigen 2 (LAGE-1a); Melanoma-associated antigen 1 (MAGE-A1); ETS translocation-variant gene 6, located on chromosome 12p (ETV6-AML); sperm protein 17 (SPA17); X Antigen Family, Member lA (XAGE1); angiopoietin-binding cell surface receptor 2 (Tie 2); melanoma cancer testis antigen-1 (MAD-CT-1); melanoma cancer testis antigen-2 (MAD-CT-2); Fos-related antigen 1; tumor protein p53 (p53); p53 mutant; prostein; surviving; telomerase; prostate carcinoma tumor antigen-1 (PCTA-1 or Galectin 8), melanoma antigen recognized by T cells 1 (MelanA or MART1); Rat sarcoma (Ras) mutant; human Telomerase reverse transcriptase (hTERT); sarcoma translocation breakpoints; melanoma inhibitor of apoptosis (ML-IAP); ERG (transmembrane protease, serine 2 (TMPRSS2) ETS fusion gene); N-Acetyl glucosaminyl-transferase V (NA17); paired box protein Pax-3 (PAX3); Androgen receptor; Cyclin B1; v-myc avian myelocytomatosis viral oncogene neuroblastoma derived homolog (MYCN); Ras Homolog Family Member C (RhoC); Tyrosinase-related protein 2 (TRP-2); Cytochrome P450 1B1 (CYP1B1); CCCTC-Binding Factor (Zinc Finger Protein)-Like (BORIS or Brother of the Regulator of Imprinted Sites), Squamous Cell Carcinoma Antigen Recognized By T Cells 3 (SART3); Paired box protein Pax-5 (PAX5); proacrosin binding protein sp32 (OY-TES1); lymphocyte-specific protein tyrosine kinase (LCK); A kinase anchor protein 4 (AKAP-4); synovial sarcoma, X breakpoint 2 (SSX2); Receptor for Advanced Glycation Endproducts (RAGE-1); renal ubiquitous 1 (RU1); renal ubiquitous 2 (RU2); legumain; human papilloma virus E6 (HPV E6); human papilloma virus E7 (HPV E7); intestinal carboxyl esterase; heat shock protein 70-2 mutated (mut hsp70-2); CD79a; CD79b; CD72; Leukocyte-associated immunoglobulin-like receptor 1 (LAIR1); Fc fragment of IgA receptor (FCAR or CD89); Leukocyte immunoglobulin-like receptor subfamily A member 2 (LILRA2); CD300 molecule-like family member f (CD300LF); C-type lectin domain family 12 member A (CLEC12A); bone marrow stromal cell antigen 2 (BST2); EGF-like module-containing mucin-like hormone receptor-like 2 (EMR2); lymphocyte antigen 75 (LY75); Glypican-3 (GPC3); Fc receptor-like 5 (FCRLS); and immunoglobulin lambda-like polypeptide 1 (IGLL1).

[0169] In one embodiment, the antigen binding domain of the CAR binds to a B cell antigen, e.g., CD10, CD19, CD20, CD22, CD34, CD123, FLT-3, ROR1, CD79b, CD179b, and/or CD79a.

[0170] In embodiments, the antigen binding domain of the CAR binds to CD123.

[0171] In embodiments, the antigen binding domain of the CAR binds to CD19.

[0172] In other embodiments, the antigen binding domain of the CAR binds to BCMA.

[0173] In embodiments, the antigen binding domain of the CAR binds to CLL.

### CD19 Antigen Binding Domain

[0174] In one embodiment, the CD19 binding domain comprises a heavy chain complementary determining region 1 (HC CDR1), a heavy chain complementary determining region 2 (HC CDR2), and a heavy chain complementary determining region 3 (HC CDR3) of any CD19 heavy chain binding domain amino acid sequence listed in Table 2 or 3; and a light chain complementary determining region 1 (LC CDR1), a light chain complementary determining region 2 (LC CDR2), and a light chain complementary determining region 3 (LC CDR3) of any CD19 light chain binding domain amino acid sequence listed in Table 2 or 3. In one embodiment, the CD19 binding domain comprises a HC CDR1, a HC CDR2, and a HC CDR3 according to the HC CDR amino acid sequences in Table 4, and a LC CDR1, a LC CDR2, and a LC CDR3 according to the LC CDR amino acid sequences in Table 5.

[0175] In one embodiment, the CD19 binding domain comprises (e.g., consists of) the amino acid sequence selected from the group consisting of SEQ ID NO: 109, SEQ ID NO: 45, SEQ ID NO: 46, SEQ ID NO: 47, SEQ ID NO:48, SEQ ID NO:49, SEQ ID NO: 50, SEQ ID NO: 51, SEQ ID NO: 52, SEQ ID NO: 53, SEQ ID NO: 54, SEQ ID NO: 55, SEQ ID NO: 56, SEQ ID NO: 110, SEQ ID NO: 112, or SEQ ID NO: 115. In one embodiment, the CD19 binding domain comprises (e.g., consists of) an amino acid sequence having at least one, two or three modifications but not more than 30, 20 or 10 modifications (e.g., substitutions, e.g., conservative substitutions) to any of SEQ ID NO: 109, SEQ ID NO: 45, SEQ ID NO: 46, SEQ ID NO: 47, SEQ ID NO:48, SEQ ID NO:49, SEQ ID NO: 50, SEQ ID NO: 51, SEQ ID NO: 52, SEQ ID NO: 53, SEQ ID NO: 54, SEQ ID NO: 55, SEQ ID NO: 56, SEQ ID NO: 110, SEQ ID NO: 112, or SEQ ID NO: 115. In one embodiment, the CD19 binding domain comprises (e.g., consists of) an amino acid sequence with 95-99% identity to the amino acid sequence to any of SEQ ID NO: 109, SEQ ID NO: 45, SEQ ID NO: 46, SEQ ID NO: 47, SEQ ID NO:48, SEQ ID NO:49, SEQ ID NO: 50, SEQ ID NO: 51, SEQ ID NO: 52, SEQ ID NO: 53, SEQ ID NO: 54, SEQ ID NO: 55, SEQ ID NO: 56, SEQ ID NO: 110, SEQ ID NO: 112, or SEQ ID NO: 115.

### Additional Domains of a CAR Molecule

[0176] In one embodiment, the CAR, e.g., CD19 CAR, includes a transmembrane domain that comprises a transmembrane domain of a protein, e.g., a protein described herein, e.g., selected from the group consisting of the alpha, beta or zeta chain of the T-cell receptor, CD28, CD3 epsilon, CD45, CD4, CDS, CD8, CD9, CD16, CD22, CD33, CD37, CD64, CD80, CD86, CD134, CD137 and CD154. In one embodiment, the transmembrane domain comprises the sequence of SEQ ID NO: 6. In one embodiment, the transmembrane domain comprises an amino acid sequence comprising at least one, two or three modifications but not more than 20, 10 or 5 modifications of the amino acid sequence of SEQ ID NO:6, or a sequence with 95-99% identity to an amino acid sequence of SEQ ID NO:6. In one embodiment, the nucleic acid sequence encoding the transmembrane domain comprises a nucleotide sequence of SEQ ID NO: 17, or a sequence at least 95% identical (e.g., with 95-99% identity) thereof.

[0177] In one embodiment, the antigen binding domain (e.g., CD19 binding domain) is connected to the transmembrane domain by a hinge region, e.g., a hinge region described herein. In one embodiment, the encoded hinge region comprises SEQ ID NO: 2, or a sequence at least 95% identical (e.g., with 95-99% identity) thereof. In one embodiment, the nucleic acid sequence encoding the hinge region comprises a nucleotide sequence of SEQ ID NO: 13, or a sequence at least 95% identical (e.g., with 95-99% identity) thereof.

[0178] In one embodiment, the isolated nucleic acid molecule further comprises a sequence encoding a costimulatory domain, e.g., a costimulatory domain described herein. In embodiments, the intracellular signaling domain comprises a costimulatory domain. In embodiments, the intracellular signaling domain comprises a primary signaling domain. In embodiments, the intracellular signaling domain comprises a costimulatory domain and a primary signaling domain.

[0179] In one embodiment, the costimulatory domain is a functional signaling domain from a protein, e.g., described herein, e.g., selected from the group consisting of a MHC class I molecule, a TNF receptor protein, an Immunoglobulin-like protein, a cytokine receptor, an integrin, a signaling lymphocytic activation molecule (SLAM protein), an activating NK cell receptor, BTLA, a Toll ligand receptor, OX40, CD2, CD7, CD27, CD28, CD30, CD40, CDS, ICAM-1, LFA-1 (CD11a/CD18), 4-1BB (CD137), B7-H3, CDS, ICAM-1, ICOS (CD278), GITR, BAFFR, LIGHT, HVEM (LIGHTR), KIRDS2, SLAMF7, NKp80 (KLRF1), NKp44, NKp30, NKp46, CD19, CD4, CD8alpha, CD8beta, IL2R beta, IL2R gamma, IL7R alpha, ITGA4, VLA1, CD49a, ITGA4, IA4, CD49D, ITGA6, VLA-6, CD49f, ITGAD, CD11d, ITGAE, CD103, ITGAL, CD11a, LFA-1, ITGAM, CD11b, ITGAX, CD11c, ITGB1, CD29, ITGB2, CD18, LFA-1, ITGB7, NKG2D, NKG2C, TNFR2, TRANCE/RANKL, DNAM1 (CD226), SLAMF4 (CD244, 2B4), CD84, CD96 (Tactile), CEACAM1, CRTAM, Ly9 (CD229), CD160 (BY55), PSGL1, CD100 (SEMA4D), CD69, SLAMF6 (NTB-A, Ly108), SLAM (SLAMF1, CD150, IPO-3), BLAME (SLAMF8), SELPLG (CD162), LTBR, LAT, GADS, SLP-76, PAG/Cbp, CD19a, and a ligand that specifically binds with CD83.

[0180] In one embodiment, the costimulatory domain of 4-1BB comprises the amino acid sequence of SEQ ID NO: 7. In one embodiment, the encoded costimulatory domain comprises an amino acid sequence having at least one, two or three modifications but not more than 20, 10 or 5 modifications of an amino acid sequence of SEQ ID NO: 7, or a sequence at least 95% identical (e.g., with 95-99% identity) to the amino acid sequence of SEQ ID NO: 7. In one embodiment, the nucleic acid sequence encoding the costimulatory domain comprises the nucleotide sequence of SEQ ID NO: 18, or a sequence at least 95% identical (e.g., with 95-99% identity) thereof. In another embodiment, the costimulatory domain of CD28 comprises the amino acid sequence of SEQ ID NO: 36. In one embodiment, the costimulatory domain comprises an amino acid sequence having at least one, two or three modifications but not more than 20, 10 or 5 modifications of an amino acid sequence of SEQ ID NO: 36, or a sequence with 95-99% identity to an amino acid sequence of SEQ ID NO: 36. In one embodiment, the nucleic acid sequence encoding the costimulatory domain of CD28 comprises the nucleotide sequence of SEQ ID NO: 37, or a sequence at least 95% identical (e.g., with 95-99% identity) thereof. In another embodiment, the costimulatory domain of CD27 comprises the amino acid sequence of SEQ ID NO: 8. In one embodiment, the costimulatory domain comprises an amino acid sequence having at least one, two or three modifications but not more than 20, 10 or 5 modifications of an amino acid sequence of SEQ ID NO: 8, or a sequence at least 95% identical (e.g., with 95-99% identity) to an amino acid sequence of SEQ ID NO: 8. In one embodiment, the nucleic acid sequence encoding the costimulatory domain of CD27 comprises the nucleotide sequence of SEQ ID NO: 19, or a sequence at least 95% identical (e.g., with 95-99% identity) thereof. In another embodiment, the costimulatory domain of ICOS comprises the amino acid sequence of SEQ ID NO: 38. In one embodiment, the costimulatory domain of ICOS comprises an amino acid sequence having at least one, two or three modifications but not more than 20, 10 or 5 modifications of an amino acid sequence of SEQ ID NO: 38, or a sequence with 95-99% identity to an amino acid sequence of SEQ ID NO: 38. In one embodiment, the nucleic acid sequence encoding the costimulatory domain of ICOS comprises the nucleotide sequence of SEQ ID NO: 44, or a sequence at least 95% identical (e.g., with 95-99% identity) thereof. In embodiments, the costimulatory domain comprises an ICOS costimulatory domain mutant (e.g., Y to F mutant) comprising the amino acid sequence of SEQ ID NO: 43.

[0181] In some embodiments, the primary signaling domain comprises a functional signaling domain of CD3 zeta. In embodiments, the functional signaling domain of CD3 zeta comprises the amino acid sequence of SEQ ID NO: 9 (mutant CD3 zeta) or SEQ ID NO: 10 (wild type human CD3 zeta), or a sequence at least 95% identical (e.g., with 95-99% identity) thereof.

[0182] In one embodiment, the intracellular signaling domain comprises a functional signaling domain of 4-1BB and/or a functional signaling domain of CD3 zeta. In one embodiment, the intracellular signaling domain of 4-1BB comprises the sequence of SEQ ID NO: 7 and/or the CD3 zeta amino acid sequence of SEQ ID NO: 9 or SEQ ID NO: 10. In one embodiment, the intracellular signaling domain comprises an amino acid sequence having at least one, two or three modifications but not more than 20, 10 or 5 modifications of an amino acid sequence of SEQ ID NO:7 and/or an amino acid sequence of SEQ ID NO:9 or SEQ ID NO:10, or a sequence at least 95% identical (e.g., with 95-99% identity) to an amino acid sequence of SEQ ID NO:7 and/or an amino acid sequence of SEQ ID NO:9 or SEQ ID NO:10. In one embodiment, the intracellular signaling domain comprises the sequence of SEQ ID NO:7 and the sequence of SEQ ID NO:9 or SEQ ID NO:10, wherein the sequences comprising the intracellular signaling domain are expressed in the same frame and as a single polypeptide chain. In one embodiment, the nucleic acid sequence encoding the intracellular signaling domain comprises the nucleotide sequence of SEQ ID NO:18, or a sequence at least 95% identical (e.g., with 95-99% identity) thereof, and/or the CD3 zeta nucleotide sequence of SEQ ID NO:20 or SEQ ID NO:21, or a sequence at least 95% identical (e.g., with 95-99% identity) thereof.

[0183] In one embodiment, the intracellular signaling domain comprises a functional signaling domain of CD27 and/or a functional signaling domain of CD3 zeta. In one embodiment, the encoded intracellular signaling domain of CD27 comprises the amino acid sequence of SEQ ID NO:8 and/or the CD3 zeta amino acid sequence of SEQ ID NO:9 or SEQ ID NO:10. In one embodiment, the intracellular signaling domain comprises an amino acid sequence having at least one, two or three modifications but not more than 20, 10 or 5 modifications of an amino acid sequence of SEQ ID NO:8 and/or an amino acid sequence of SEQ ID NO:9 or SEQ ID NO:10, or a sequence at least 95% identical (e.g., with 95-99% identity) to an amino acid sequence of SEQ ID NO:8 and/or an amino acid sequence of SEQ ID NO:9 or SEQ ID NO:10. In one embodiment, the intracellular signaling domain comprises the sequence of SEQ ID NO:8 and the sequence of SEQ ID NO:9 or SEQ ID NO:10, wherein the sequences comprising the intracellular signaling domain are expressed in the same frame and as a single polypeptide chain. In one embodiment, the nucleic acid sequence encoding the intracellular signaling domain of CD27 comprises the nucleotide sequence of SEQ ID NO:19, or a sequence at least 95% identical (e.g., with 95-99% identity) thereof, and/or the CD3 zeta nucleotide sequence of SEQ ID NO:20 or SEQ ID NO:21, or a sequence at least 95% identical (e.g., with 95-99% identity) thereof.

[0184] In one embodiment, the intracellular signaling domain comprises a functional signaling domain of CD28 and/or a functional signaling domain of CD3 zeta. In one embodiment, the intracellular signaling domain of CD28 comprises the amino acid sequence of SEQ ID NO: 36 and/or the CD3 zeta amino acid sequence of SEQ ID NO:9 or SEQ ID NO:10. In one embodiment, the intracellular signaling domain comprises an amino acid sequence having at least one, two or three modifications but not more than 20, 10 or 5 modifications of an amino acid sequence of SEQ ID NO: 36 and/or an amino acid sequence of SEQ ID NO:9 or SEQ ID NO:10, or a sequence at least 95% identical (e.g., with 95-99% identity) to an amino acid sequence of SEQ ID NO: 36 and/or an amino acid sequence of SEQ ID NO:9 or SEQ ID NO:10. In one embodiment, the intracellular signaling domain comprises the sequence of SEQ ID NO: 36 and the sequence of SEQ ID NO:9 or SEQ ID NO:10, wherein the sequences comprising the intracellular signaling domain are expressed in the same frame and as a single polypeptide chain. In one embodiment, the nucleic acid sequence encoding the intracellular signaling domain of CD28 comprises the nucleotide sequence of SEQ ID NO: 37, or a sequence at least 95% identical (e.g., with 95-99% identity) thereof, and/or the CD3 zeta nucleotide sequence of SEQ ID NO:20 or SEQ ID NO:21, or a sequence at least 95% identical (e.g., with 95-99% identity) thereof.

[0185] In one embodiment, the intracellular signaling domain comprises a functional signaling domain of ICOS and/or a functional signaling domain of CD3 zeta. In one embodiment, the intracellular signaling domain of ICOS comprises the amino acid sequence of SEQ ID NO: 38 and/or the CD3 zeta amino acid sequence of SEQ ID NO:9 or SEQ ID NO:10. In one embodiment, the intracellular signaling domain comprises an amino acid sequence having at least one, two or three modifications but not more than 20, 10 or 5 modifications of an amino acid sequence of SEQ ID NO: 38 and/or an amino acid sequence of SEQ ID NO:9 or SEQ ID NO:10, or a sequence at least 95% identical (e.g., with 95-99% identity) to an amino acid sequence of SEQ ID NO: 38 and/or an amino acid sequence of SEQ ID NO:9 or SEQ ID NO:10. In one embodiment, the intracellular signaling domain comprises the sequence of SEQ ID NO: 38 and the sequence of SEQ ID NO:9 or SEQ ID NO:10, wherein the sequences comprising the intracellular signaling domain are expressed in the same frame and as a single polypeptide chain. In one embodiment, the nucleic acid sequence encoding the intracellular signaling domain of ICOS comprises the nucleotide sequence of SEQ ID NO: 44, or a sequence at least 95% identical (e.g., with 95-99% identity) thereof, and/or the CD3 zeta nucleotide sequence of SEQ ID NO:20 or SEQ ID NO:21, or a sequence at least 95% identical (e.g., with 95-99% identity) thereof.

[0186] In one embodiment, the CAR, e.g., CD19 CAR, further comprises a leader sequence comprising the amino acid sequence of SEQ ID NO:1.

### Exemplary CAR Molecules

[0187] In one embodiment, the CD19 CAR comprises the amino acid sequence of any of SEQ ID NO: 108; SEQ ID NO: 93; SEQ ID NO: 94, SEQ ID NO: 95, SEQ ID NO: 96, SEQ ID NO: 97, SEQ ID NO: 98, SEQ ID NO: 99, SEQ ID NO: 100, SEQ ID NO: 101, SEQ ID NO: 102, SEQ ID NO: 103, SEQ ID NO: 104, SEQ ID NO: 111, SEQ ID NO: 114, or SEQ ID NO: 116. In one embodiment, the CD19 CAR comprises an amino acid sequence having at least one, two or three modifications but not more than 30, 20 or 10 modifications to any of SEQ ID NO: 108; SEQ ID NO: 93; SEQ ID NO: 94, SEQ ID NO: 95, SEQ ID NO: 96, SEQ ID NO: 97, SEQ ID NO: 98, SEQ ID NO: 99, SEQ ID NO: 100, SEQ ID NO: 101, SEQ ID NO: 102, SEQ ID NO: 103, SEQ ID NO: 104, SEQ ID NO: 111, SEQ ID NO: 114, or SEQ ID NO: 116. In one embodiment, the CD19 CAR comprises an amino acid sequence at least 95% identical (e.g., with 95-99% identity) to any of SEQ ID NO: 108; SEQ ID NO: 93; SEQ ID NO: 94, SEQ ID NO: 95, SEQ ID NO: 96, SEQ ID NO: 97, SEQ ID NO: 98, SEQ ID NO: 99, SEQ ID NO: 100, SEQ ID NO: 101, SEQ ID NO: 102, SEQ ID NO: 103, SEQ ID NO: 104, SEQ ID NO: 111, SEQ ID NO: 114, or SEQ ID NO: 116.

[0188] In an embodiment, the CAR molecule comprises a CD123 CAR described herein, e.g., a CD123 CAR described in US2014/0322212A1 or US2016/0068601A1, both incorporated herein by reference. In embodiments, the CD123 CAR comprises an amino acid, or has a nucleotide sequence shown in US2014/0322212A1 or US2016/0068601A1, both incorporated herein by reference.

[0189] In embodiments, the CAR molecule comprises a CD19 CAR molecule described herein, e.g., a CD19 CAR molecule described in US-2015-0283178-A1, e.g., CTL019. In embodiments, the CD19 CAR comprises an amino acid, or has a nucleotide sequence shown in US-2015-0283178-A1, incorporated herein by reference.

[0190] In one embodiment, CAR molecule comprises a BCMA CAR molecule described herein, e.g., a BCMA CAR described in US-2016-0046724-A1. In embodiments, the BCMA CAR comprises an amino acid, or has a nucleotide sequence shown in US-2016-0046724-A1, incorporated herein by reference.

[0191] In an embodiment, the CAR molecule comprises a CLL1 CAR described herein, e.g., a CLL1 CAR described in US2016/0051651A1, incorporated herein by reference. In embodiments, the CLL1 CAR comprises an amino acid, or has a nucleotide sequence shown in US2016/0051651A1, incorporated herein by reference.

[0192] In an embodiment, the CAR molecule comprises a CD33 CAR described herein, e.ga CD33 CAR described in US2016/0096892A1, incorporated herein by reference. In embodiments, the CD33 CAR comprises an amino acid, or has a nucleotide sequence shown in US2016/0096892A1, incorporated herein by reference.

[0193] In an embodiment, the CAR molecule comprises an EGFRvIII CAR molecule described herein, e.g., an EGFRvIII CAR described US2014/0322275A1, incorporated herein by reference. In embodiments, the EGFRvIII CAR comprises an amino acid, or has a nucleotide sequence shown in US2014/0322275A1, incorporated herein by reference.

[0194] In an embodiment, the CAR molecule comprises a mesothelin CAR described herein, e.g., a mesothelin CAR described in WO 2015/090230, incorporated herein by reference. In embodiments, the mesothelin CAR comprises an amino acid, or has a nucleotide sequence shown in WO 2015/090230, incorporated herein by reference.

[0195] In embodiments of any of the methods and compositions described herein, the cell comprising a CAR comprises a nucleic acid encoding the CAR.

[0196] In one embodiment, the nucleic acid encoding the CAR is a lentiviral vector. In one embodiment, the nucleic acid encoding the CAR is introduced into the cells by lentiviral transduction. In one embodiment, the nucleic acid encoding the CAR is an RNA, e.g., an in vitro transcribed RNA. In one embodiment, the nucleic acid encoding the CAR is introduced into the cells by electroporation.

[0197] In embodiments of any of the methods and compositions described herein, the cell is a T cell or an NK cell. In one embodiment, the T cell is an autologous or allogeneic T cell.

[0198] In one embodiment, the method further comprises administering an additional therapeutic agent for treating a disease described herein, e.g., an anti-cancer therapeutic agent. In embodiments, the method further comprises administering a lymphodepleting agent, e.g., described herein, e.g., before, concurrently with, or after administration with a CAR-expressing cell (e.g., CD19 CAR-expressing cell) and/or a PD-1 inhibitor described herein. In embodiments, the lymphodepleting agent comprises one or more chemotherapy agents, combination of chemotherapy agents, radiation therapy, or combination chemotherapy-radiation therapy, including, but not limited to, melphalan, cyclophosphamide, fludarabine, bendamustine, and cyclophosphamide-radiation therapy.

[0199] In embodiments of any of the methods and compositions described herein, the disease (e.g., cancer), e.g., the disease associated with CD19 expression, is a cancer. In one embodiment, the cancer is a hematological cancer. In embodiments, the hematological cancer is chosen from one or more of: B-cell acute lymphoid leukemia (BALL), T-cell acute lymphoid leukemia (TALL), small lymphocytic leukemia (SLL), acute lymphoid leukemia (ALL), chronic myelogenous leukemia (CML), chronic lymphocytic leukemia (CLL), mantle cell lymphoma (MCL), B cell prolymphocytic leukemia, blastic plasmacytoid dendritic cell neoplasm, Burkitt's lymphoma, diffuse large B cell lymphoma, follicular lymphoma, hairy cell leukemia, small cell- or a large cell-follicular lymphoma, malignant lymphoproliferative conditions, MALT lymphoma, Marginal zone lymphoma, multiple myeloma, myelodysplasia and myelodysplastic syndrome, non-Hodgkin lymphoma, Hodgkin lymphoma, plasmablastic lymphoma, plasmacytoid dendritic cell neoplasm, or Waldenstrom macroglobulinemia. In embodiments, the hematological cancer is a leukemia, e.g., an acute leukemia or a chronic leukemia. In other embodiments, the hematological cancer is a lymphoma, e.g., non-Hodgkin lymphoma or Hodgkin lymphoma. In embodiments, the non-Hodgkin lymphoma is Burkitt lymphoma, chronic lymphocytic leukemia/small lymphocytic lymphoma (CLL/SLL), diffuse large B-cell lymphoma (DLBCL), follicular lymphoma, immunoblastic large cell lymphoma, precursor B-lymphoblastic lymphoma, and mantle cell lymphoma, mycosis fungoides, anaplastic large cell lymphoma, or precursor T-lymphoblastic lymphoma.

[0200] In one embodiment, the cancer expresses CD19, e.g., expresses CD19. In other embodiments, the cancer is relapsed or refractory B-ALL. In one embodiment, the cancer is relapsed or refractory B-ALL with lymph node involvement, e.g., with lymphomatous disease. In other embodiments, the cancer is DLBCL, e.g., relapsed or refractory DLBCL.

[0201] In some embodiments, the CAR therapy, e.g., a CD19 CAR therapy, is administered in combination with a PD-1 inhibitor, e.g., a PD-1 inhibitor as described herein, to a subject having Hodgkin Lymphoma (HL), e.g., relapsed or refractory HL. In an embodiment, the CAR therapy is administered to a subject having a relapsed and/or refractory HL after the PD-1 inhibitor. In another embodiment, the PD-1 inhibitor is administered to a subject having a relapsed and/or refractory HL after the CAR therapy, e.g., as described herein. In another embodiment, administration of the PD-1 inhibitor is initiated 20 days or less after administration of the CAR therapy, e.g., as described herein. In some embodiments, the CD19 CAR-expressing cell is a cell into which RNA encoding the CD19CAR was introduced, e.g., by electroporation. In embodiments, the subject comprises CD19-negative and CD19-positive cancer cells. In embodiments, the subject is treated with 6 doses of the CAR-expressing cells, e.g., over the course of 2 weeks. In embodiments, the dose comprises 1×10⁵-5×10⁶ or 8×10⁵-1.5×10⁶ CD19 CAR-expressing cells per dose, e.g., for subjects of <80 kg, or 1×10⁸ (±50%) or 1×10⁸ (±20%) CD19 CAR-expressing cells per dose, e.g., for subjecs of ≥80 kg. In embodiments, the dose comprises about 1×10⁵-1.5×10⁶ CD19 CAR-expressing cells per dose. In embodiments, the subject does not experience CRS or does not experience severe CRS. In embodiments, the subject experiences a complete response, partial response, or stable disease.

### Subjects

[0202] In one embodiment, the subject, e.g., the subject from which immune cells are acquired and/or the subject to be treated, is a human, e.g., a cancer patient. In certain embodiments, the subject is 18 years of age or younger (e.g., 18, 17, 16, 15, 14, 13, 12, 11, 10, 9, 8, 7, 6, 5, 4, 3, 2, 1 year or younger (e.g., 12 months, 6 months, 3 months or less)). In one embodiment, the subject is a pediatric cancer patient.

[0203] In other embodiments, the subject is an adult, e.g., the subject is older than 18 years of age (e.g., older than 18, 19, 20, 25, 30, 35, 40, 45, 50, 55, 60, 65, 70, 75, 80, or older). In one embodiment, the subject is an adult cancer patient.

[0204] In certain embodiments, the subject has a disease associated with expression of a tumor- or cancer associated-antigen, e.g., a disease as described herein. In one embodiment, the subject has a cancer, e.g., a cancer as described herein.

[0205] In one embodiment, the subject has a cancer that is chosen from a hematological cancer, a solid tumor, or a metastatic lesion thereof. Exemplary cancers include, but are not limited to, B-cell acute lymphocytic leukemia (B-ALL), T-cell acute lymphocytic leukemia (T-ALL), acute lymphocytic leukemia (ALL), chronic myelogenous leukemia (CML), chronic lymphocytic leukemia (CLL), B cell promyelocytic leukemia, blastic plasmacytoid dendritic cell neoplasm, Burkitt's lymphoma, diffuse large B cell lymphoma (DLBCL), follicular lymphoma, hairy cell leukemia, small cell- or a large cell-follicular lymphoma, malignant lymphoproliferative conditions, MALT lymphoma, mantle cell lymphoma (MCL), marginal zone lymphoma, multiple myeloma, myelodysplasia and myelodysplastic syndrome, non-Hodgkin's lymphoma (NHL), Hodgkin's lymphoma (HL), plasmablastic lymphoma, plasmacytoid dendritic cell neoplasm, and Waldenstrom macroglobulinemia. In one embodiment, the cancer is ALL. In another embodiment, the cancer is CLL. In one embodiment, the cancer is DLBCL, e.g., relapsed or refractory DLBCL.

[0206] In embodiments, the subject has a leukemia, e.g., ALL (e.g., B-ALL). In embodiments, the subject has leukemia, e.g., ALL, and is a pediatric patient, e.g., is 18 years of age of younger (e.g., 18, 17, 16, 15, 14, 13, 12, 11, 10, 9, 8, 7, 6, 5, 4, 3, 2, 1 year or younger (e.g., 12 months, 6 months, 3 months or less)).

[0207] In embodiments, the subject has a lymphoma, e.g., DLBCL. In embodiments, the subject has lymphoma, e.g., DLBCL (e.g., relapsed or refractory DLBCL), and is an adult patient, e.g., is older than 18 years of age (e.g., older than 18, 19, 20, 25, 30, 35, 40, 45, 50, 55, 60, 65, 70, 75, 80, or older).

[0208] In embodiments, the subject has (e.g., is diagnosed with) a disease (e.g., cancer) described herein, e.g., a disease associated with CD19 expression, e.g., a cancer associated with CD19 expression described herein. In embodiments, the subject has a relapsed and/or refractory cancer, e.g., relapsed or refractory lymphoma, e.g., CD19+ lymphoma. In embodiments, the subject has DLBCL, e.g., CD19+ DLBCL. In embodiments, the subject has DLBCL transformed from follicular lymphoma. In embodiments, the subject has DLBCL and progressive lymphoma. In embodiments, the subject has DLBCL with primary mediastinal origin. In embodiments, the subject has previously been treated for a lymphoma, e.g., DLBCL, and has refractory lymphoma, e.g., refractory DLBCL.

[0209] In embodiments, the subject has (e.g., is diagnosed with) a high tumor burder cancer, e.g., before the first dose is administered. In one embodiment, the cancer is ALL or CLL. In embodiments, the subject has bone marrow blast levels of at least 1%, 2%, 3%, 4%, 5%, 6%, 7%, 8%, 9%, 10%, 15%, 20%, 25%, 30%, 35%, 40%, 45%, or 50%, e.g., at least 5%. In embodiments, the subject has a cancer in stage I, II, III, or IV. In embodiments, the subject has a tumor mass of at least 1, 2, 5, 10, 20, 50, 100, 200, 500, or 1000 g, e.g., in a single tumor or a plurality of tumors.

[0210] In embodiments, the subject has been administered a chemotherapy, e.g., a chemotherapy described herein (e.g., lymphodepleting chemotherapy, e.g., carboplatin and/or gemcitabine), prior to administration with a CAR-expressing cell and/or a PD-1 inhibitor described herein. In embodiments, the subject has been administered an immunotherapy, e.g., an allogeneic bone marrow transplant, prior to administration with a CAR-expressing cell and/or a PD-1 inhibitor described herein.

[0211] In embodiments of any of the methods and compositions described herein, the subject is a mammal, e.g., a human. In one embodiment, the subject expresses PD-1. In one embodiment, the cancer cell or a cell in close proximity to a cancer cell, e.g., a cancer-associated cell, in the subject expresses PD-1 or PL-L1. In an embodiment, the cancer-associated cell is an anti-tumor immune cell, e.g., a tumor infiltrating lymphocyte (TIL).

[0212] In one embodiment, the cell expressing a CAR, e.g., a CD19 CAR-expressing cell described herein, expresses PD-1.

[0213] Unless otherwise defined, all technical and scientific terms used herein have the same meaning as commonly understood by one of ordinary skill in the art to which this invention belongs. Although methods and materials similar or equivalent to those described herein can be used in the practice or testing of the present invention, suitable methods and materials are described below. All publications, patent applications, patents, and other references mentioned herein are incorporated by reference in their entirety. In addition, the materials, methods, and examples are illustrative only and not intended to be limiting. Headings, sub-headings or numbered or lettered elements, e.g., (a), (b), (i) etc, are presented merely for ease of reading. The use of headings or numbered or lettered elements in this document does not require the steps or elements be performed in alphabetical order or that the steps or elements are necessarily discrete from one another. Other features, objects, and advantages of the invention will be apparent from the description and drawings, and from the claims.

### BRIEF DESCRIPTION OF THE DRAWINGS

[0214] FIG. 1A is an image of PD-L1 (CD274) expression in the patient's diffuse large B-cell lymphoma cells. Biopsy was obtained prior to CART19 cell infusion. Immunohistochemical staining with an anti-PD-L1 antibody from Cell Signaling (clone E1J2J, cat# 15165BF). The main image is at 40× magnification, the upper-right corner inset at 100×.

[0215] FIG. 1B is a panel of CT scans demonstrating clinical response to pembrolizumab after three weeks. Images on the left are on day of pembrolizumab infusion (day 26) and images on the right are 3 weeks after pembrolizumab infusion (day 45).

[0216] FIGS. 2A-2L are graphs showing correlative studies examining changes in T cell subsets in relation to CART19 infusion and pembrolizumab infusion. (FIG. 2A) Percentage of CART19+ CD3+ cells in peripheral blood. Percentage CART19+ of CD3+ cells prior to CART19 infusion (pre), three days after CART19 infusion (Day 3), 7 days after CART19 (Day 7), ten days after CART19 (Day 10), fourteen days after CART19 (Day 14), twenty-six days after CART19 and one hour after pembrolizumab infusion (Day 26), twenty-seven days after CART19 and 1 day after pembrolizumab (Day 27), twenty-eight days after CART19 and 2 days after pembrolizumab (Day 28), and forty-five days after CART19 and fourteen days after pembrolizumab (Day 45). (FIG. 2B) Fold change from baseline in IL-6 serum levels. (FIG. 2C) Percentage of PD1+CD4+ cells and PD1+CART19+CD4+ cells in peripheral blood. (FIG. 2D) Percentage of PD1+CD8+ cells and PD1+CART19+CD8+ cells in peripheral blood. (FIG. 2E) Percentage of PD1+Eomes+CD4+ cells and PD1+Eomes+CART19+CD4+ cells in peripheral blood. (FIG. 2F) Percentage of PD1+Eomes+CD8+ cells and PD1+Eomes+CART19+CD8+ cells in peripheral blood. (FIG. 2G) Percentage of Granzyme B+CD4+ cells and Granzyme B+CART19+CD4+ cells in peripheral blood. (FIG. 2H) Percentage of Granzyme B+CD8+ cells and Granzyme B+CART19+CD8+ cells in peripheral blood. (FIG. 2I) Percentage of PD1+CD4+ cells and PD1+Eomes+CD4+ cells in peripheral blood. (FIG. 2J) Percentage of PD1+CD4+CART19+ cells and PD1+Eomes+CD4+CART19+ cells in peripheral blood. (FIG. 2K) Percentage of PD1+CD8+ cells and PD1+Eomes+C8+ cells in peripheral blood. (FIG. 2L) Percentage of PD1+ CD8+CART19+ cells and PD1+Eomes+CD8+CART19+ cells in peripheral blood.

[0217] FIG. 3 shows the expression of PD-L1, PD1, LAG3, and TIM3 (from left to right in each set of four bars) in lymph node (LN) and bone marrow (BM) samples from five CR patients, one unclassified patient, and six PD patients.

[0218] FIGS. 4A, 4B, 4C, and 4D show flow cytometry analysis of PD1 and CAR19 expression on T cells. FIGS. 4A and 4B are representative flow cytometry profiles demonstrating the distribution of PD-1 and CAR19 expression on CD4+ T cells from subjects that are complete responders (CR) or non-responders (NR) to CART therapy. FIG. 4C is a graph showing the percent of PD1 cells in the CD4+ T cell population from groups of subjects with different responses to CART therapy. FIG. 4D is a graph showing the percent of PD1 cells in the CD8+ T cell population from groups of subjects with different responses to CART therapy.

[0219] FIGS. 5A and 5B show the distribution of PD1 expression in CD4 and CAR19-expressing cells (FIG. 5A) or CD8 and CAR19-expressing cells (FIG. 5B) from groups of subjects with different responses to CART therapy.

[0220] FIG. 6 shows flow cytometry analysis of PD1, CAR 19, LAG3, and TIM3 expression on T cells from subjects that are complete responders (CR) or non-responders (NR) to CART therapy.

[0221] FIGS. 7A and 7B show the distribution of PD1 and LAG3 expression (FIG. 7A) or PD1 and TIM3 expression (FIG. 7B) from groups of subjects with different responses to CART therapy.

[0222] FIG. 8 shows multiplex FIHC AQUA analysis showing significant difference between CD3+/PD-1+ cell populations in primary and secondary human DLBCL patient samples.

[0223] FIG. 9 shows AQUA analysis showing various levels of CD19 (lower panel) and PD-L1 (upper panel) in primary and secondary sites of DLBCL samples. A total of 40 human DLBCL patient samples, 25 primary and 15 secondary sites, were subjected to multiplex FIHC and followed by AQUA analysis to identify expression levels of CD19 and PD-L1 proteins.

[0224] FIG. 10 shows the percentage of CART19 cells in the patient from Case 3 after infusion of CART19 cells alone or after infusion of CART19 cells with a dose of Pembrolizumab.

[0225] FIG. 11 shows a graph of the probability of B cell recovery vs months post huCART19 infusion for patients receiving only huCART19 or huCART19 and Pembrolizumab.

[0226] FIG. 12 shows the percentage of CART19 in the patient from Case 6 infused with CART19 alone (circles) and after treatment with Pembrolizumab (squares).

[0227] FIG. 13 shows the percentage of CART19 in the patient from Case 6 with CART19 before and after treatment with Pembrolizumab, integrated with PET scan data before and after treatment with Pembrolizumab.

[0228] FIG. 14 is a graph depicting levels of CART19 RNA expression in the peripheral blood of four patients who received RNA CART19 therapy. Quantitative RT-PCR was performed on cells collected before and after each infusion (Days 0, 2, 4, 9, 11 and 14).

### DETAILED DESCRIPTION

### Definitions

[0229] Unless defined otherwise, all technical and scientific terms used herein have the same meaning as commonly understood by one of ordinary skill in the art to which the invention pertains.

[0230] The term “a” and “an” refers to one or to more than one (i.e., to at least one) of the grammatical object of the article. By way of example, “an element” means one element or more than one element.

[0231] The term “about” when referring to a measurable value such as an amount, a temporal duration, and the like, is meant to encompass variations of ±20% or in some instances ±10%, or in some instances ±5%, or in some instances ±1%, or in some instances ±0.1% from the specified value, as such variations are appropriate to perform the disclosed methods.

[0232] Administered “in combination”, as used herein, means that two (or more) different treatments are delivered to the subject during the course of the subject's affliction with the disorder, e.g., the two or more treatments are delivered after the subject has been diagnosed with the disorder and before the disorder has been cured or eliminated or treatment has ceased for other reasons. In some embodiments, the delivery of one treatment is still occurring when the delivery of the second begins, so that there is overlap in terms of administration. This is sometimes referred to herein as “simultaneous” or “concurrent delivery”. In other embodiments, the delivery of one treatment ends before the delivery of the other treatment begins. In some embodiments of either case, the treatment is more effective because of combined administration. For example, the second treatment is more effective, e.g., an equivalent effect is seen with less of the second treatment, or the second treatment reduces symptoms to a greater extent, than would be seen if the second treatment were administered in the absence of the first treatment, or the analogous situation is seen with the first treatment. In some embodiments, delivery is such that the reduction in a symptom, or other parameter related to the disorder is greater than what would be observed with one treatment delivered in the absence of the other. The effect of the two treatments can be partially additive, wholly additive, or greater than additive. The delivery can be such that an effect of the first treatment delivered is still detectable when the second is delivered.

[0233] The term “Chimeric Antigen Receptor” or alternatively a “CAR” refers to a recombinant polypeptide construct comprising at least an extracellular antigen binding domain, a transmembrane domain and a cytoplasmic signaling domain (also referred to herein as “an intracellular signaling domain”) comprising a functional signaling domain derived from a stimulatory molecule as defined below. In some embodiments, the domains in the CAR polypeptide construct are in the same polypeptide chain, e.g., comprise a chimeric fusion protein. In some embodiments, the domains in the CAR polypeptide construct are not contiguous with each other, e.g., are in different polypeptide chains, e.g., as provided in an RCAR as described herein.

[0234] In one aspect, the stimulatory molecule is the zeta chain associated with the T cell receptor complex. In one aspect, the cytoplasmic signaling domain comprises a primary signaling domain (e.g., a primary signaling domain of CD3-zeta). In one aspect, the cytoplasmic signaling domain further comprises one or more functional signaling domains derived from at least one costimulatory molecule as defined below. In one aspect, the costimulatory molecule is chosen from 4-1BB (i.e., CD137), CD27, ICOS, and/or CD28. In one aspect, the CAR comprises a chimeric fusion protein comprising an extracellular antigen binding domain, a transmembrane domain and an intracellular signaling domain comprising a functional signaling domain derived from a stimulatory molecule. In one aspect, the CAR comprises a chimeric fusion protein comprising an extracellular antigen binding domain, a transmembrane domain and an intracellular signaling domain comprising a functional signaling domain derived from a co-stimulatory molecule and a functional signaling domain derived from a stimulatory molecule. In one aspect, the CAR comprises a chimeric fusion protein comprising an extracellular antigen binding domain, a transmembrane domain and an intracellular signaling domain comprising two functional signaling domains derived from one or more co-stimulatory molecule(s) and a functional signaling domain derived from a stimulatory molecule. In one aspect, the CAR comprises a chimeric fusion protein comprising an extracellular antigen binding domain, a transmembrane domain and an intracellular signaling domain comprising at least two functional signaling domains derived from one or more co-stimulatory molecule(s) and a functional signaling domain derived from a stimulatory molecule. In one aspect the CAR comprises an optional leader sequence at the amino-terminus (N-ter) of the CAR fusion protein. In one aspect, the CAR further comprises a leader sequence at the N-terminus of the extracellular antigen binding domain, wherein the leader sequence is optionally cleaved from the antigen recognition domain (e.g., a scFv) during cellular processing and localization of the CAR to the cellular membrane.

[0235] The term “signaling domain” refers to the functional portion of a protein which acts by transmitting information within the cell to regulate cellular activity via defined signaling pathways by generating second messengers or functioning as effectors by responding to such messengers. In some aspects, the signaling domain of the CAR described herein is derived from a stimulatory molecule or co-stimulatory molecule described herein, or is a synthesized or engineered signaling domain.

[0236] As used herein, the term “CD19” refers to the Cluster of Differentiation 19 protein, which is an antigenic determinant detectable on leukemia precursor cells. The human and murine amino acid and nucleic acid sequences can be found in a public database, such as GenBank, UniProt and Swiss-Prot. For example, the amino acid sequence of human CD19 can be found as UniProt/Swiss-Prot Accession No. P15391 and the nucleotide sequence encoding of the human CD19 can be found at Accession No. NM_001178098. As used herein, “CD19” includes proteins comprising mutations, e.g., point mutations, fragments, insertions, deletions and splice variants of full length wild-type CD19. CD19 is expressed on most B lineage cancers, including, e.g., acute lymphoblastic leukemia, chronic lymphocyte leukemia and non-Hodgkin lymphoma. Other cells with express CD19 are provided below in the definition of “disease associated with expression of CD19.” It is also an early marker of B cell progenitors. See, e.g., Nicholson et al. Mol. Immun. 34 (16-17): 1157-1165 (1997). In one aspect the antigen-binding portion of the CART recognizes and binds an antigen within the extracellular domain of the CD19 protein. In one aspect, the CD19 protein is expressed on a cancer cell.

[0237] The term “antibody” or “antibody molecule” as used herein, refers to a protein, or polypeptide sequence derived from an immunoglobulin molecule which specifically binds with an antigen. Antibodies can be polyclonal or monoclonal, multiple or single chain, or intact immunoglobulins, and may be derived from natural sources or from recombinant sources. Antibodies can be tetramers of immunoglobulin molecules. In one embodiment, the antibody or antibody molecule comprises, e.g., consists of, an antibody fragment.

[0238] The term “antibody fragment” refers to at least one portion of an intact antibody, or recombinant variants thereof, and refers to the antigen binding domain, e.g., an antigenic determining variable region of an intact antibody, that is sufficient to confer recognition and specific binding of the antibody fragment to a target, such as an antigen. Examples of antibody fragments include, but are not limited to, Fab, Fab′, F(ab′)₂, and Fv fragments, scFv antibody fragments, linear antibodies, single domain antibodies such as sdAb (either VL or VH), camelid VHH domains, and multi-specific antibodies formed from antibody fragments such as a bivalent fragment comprising two Fab fragments linked by a disulfide brudge at the hinge region, and an isolated CDR or other epitope binding fragments of an antibody. An antigen binding fragment can also be incorporated into single domain antibodies, maxibodies, minibodies, nanobodies, intrabodies, diabodies, triabodies, tetrabodies, v-NAR and bis-scFv (see, e.g., Hollinger and Hudson, Nature Biotechnology 23:1126-1136, 2005). Antigen binding fragments can also be grafted into scaffolds based on polypeptides such as a fibronectin type III (Fn3)(see U.S. Pat. No. 6,703,199, which describes fibronectin polypeptide minibodies).

[0239] The term “scFv” refers to a fusion protein comprising at least one antibody fragment comprising a variable region of a light chain and at least one antibody fragment comprising a variable region of a heavy chain, wherein the light and heavy chain variable regions are contiguously linked via a short flexible polypeptide linker, and capable of being expressed as a single chain polypeptide, and wherein the scFv retains the specificity of the intact antibody from which it is derived. Unless specified, as used herein an scFv may have the VL and VH variable regions in either order, e.g., with respect to the N-terminal and C-terminal ends of the polypeptide, the scFv may comprise VL-linker-VH or may comprise VH-linker-VL.

[0240] The term “complementarity determining region” or “CDR,” as used herein, refers to the sequences of amino acids within antibody variable regions which confer antigen specificity and binding affinity. For example, in general, there are three CDRs in each heavy chain variable region (e.g., HCDR1, HCDR2, and HCDR3) and three CDRs in each light chain variable region (LCDR1, LCDR2, and LCDR3). The precise amino acid sequence boundaries of a given CDR can be determined using any of a number of well-known schemes, including those described by Kabat et al. (1991), “Sequences of Proteins of Immunological Interest,” 5th Ed. Public Health Service, National Institutes of Health, Bethesda, Md. (“Kabat” numbering scheme), Al-Lazikani et al., (1997) JMB 273,927-948 (“Chothia” numbering scheme), or a combination thereof. Under the Kabat numbering scheme, in some embodiments, the CDR amino acid residues in the heavy chain variable domain (VH) are numbered 31-35 (HCDR1), 50-65 (HCDR2), and 95-102 (HCDR3); and the CDR amino acid residues in the light chain variable domain (VL) are numbered 24-34 (LCDR1), 50-56 (LCDR2), and 89-97 (LCDR3). Under the Chothia numbering scheme, in some embodiments, the CDR amino acids in the VH are numbered 26-32 (HCDR1), 52-56 (HCDR2), and 95-102 (HCDR3); and the CDR amino acid residues in the VL are numbered 26-32 (LCDR1), 50-52 (LCDR2), and 91-96 (LCDR3). In a combined Kabat and Chothia numbering scheme, in some embodiments, the CDRs correspond to the amino acid residues that are part of a Kabat CDR, a Chothia CDR, or both. For instance, in some embodiments, the CDRs correspond to amino acid residues 26-35 (HCDR1), 50-65 (HCDR2), and 95-102 (HCDR3) in a VH, e.g., a mammalian VH, e.g., a human VH; and amino acid residues 24-34 (LCDR1), 50-56 (LCDR2), and 89-97 (LCDR3) in a VL, e.g., a mammalian VL, e.g., a human VL.

[0241] The portion of the CAR of the invention comprising an antibody or antibody fragment thereof may exist in a variety of forms where the antigen binding domain is expressed as part of a contiguous polypeptide chain including, for example, scFv antibody fragments, linear antibodies, single domain antibodies such as sdAb (either VL or VH), camelid VHH domains ,a humanized antibody, a bispecific antibody, an antibody conjugate (Harlow et al., 1999, In: Using Antibodies: A Laboratory Manual, Cold Spring Harbor Laboratory Press, NY; Harlow et al., 1989, In: Antibodies: A Laboratory Manual, Cold Spring Harbor, N.Y.; Houston et al., 1988, Proc. Natl. Acad. Sci. USA 85:5879-5883; Bird et al., 1988, Science 242:423-426). In one aspect, the antigen binding domain of a CAR of the invention comprises an antibody fragment. In a further aspect, the CAR comprises an antibody fragment that comprises a scFv.

[0242] As used herein, the term “antibody molecule” refers to a protein, e.g., an immunoglobulin chain or fragment thereof, comprising at least one immunoglobulin variable domain sequence. The term antibody molecule encompasses antibodies and antibody fragments. In one embodiment, an antibody molecule encompasses a “binding domain” (also referred to herein as “anti-target (e.g., CD19) binding domain” or “target (e.g., CD19) binding domain”). In an embodiment, an antibody molecule is a multispecific antibody molecule, e.g., it comprises a plurality of immunoglobulin variable domain sequences, wherein a first immunoglobulin variable domain sequence of the plurality has binding specificity for a first epitope and a second immunoglobulin variable domain sequence of the plurality has binding specificity for a second epitope. In an embodiment, a multispecific antibody molecule is a bispecific antibody molecule. A bispecific antibody has specificity for no more than two antigens. A bispecific antibody molecule is characterized by a first immunoglobulin variable domain sequence which has binding specificity for a first epitope and a second immunoglobulin variable domain sequence that has binding specificity for a second epitope.

[0243] The term “antibody heavy chain,” refers to the larger of the two types of polypeptide chains present in antibody molecules in their naturally occurring conformations, and which normally determines the class to which the antibody belongs.

[0244] The term “antibody light chain,” refers to the smaller of the two types of polypeptide chains present in antibody molecules in their naturally occurring conformations. Kappa (κ) and lambda (λ) light chains refer to the two major antibody light chain isotypes.

[0245] The term “recombinant antibody” refers to an antibody which is generated using recombinant DNA technology, such as, for example, an antibody expressed by a bacteriophage or yeast expression system. The term should also be construed to mean an antibody which has been generated by the synthesis of a DNA molecule encoding the antibody and which DNA molecule expresses an antibody protein, or an amino acid sequence specifying the antibody, wherein the DNA or amino acid sequence has been obtained using recombinant DNA or amino acid sequence technology which is available and well known in the art.

[0246] The term “antigen” or “Ag” refers to a molecule that provokes an immune response. This immune response may involve either antibody production, or the activation of specific immunologically-competent cells, or both. The skilled artisan will understand that any macromolecule, including virtually all proteins or peptides, can serve as an antigen. Furthermore, antigens can be derived from recombinant or genomic DNA. A skilled artisan will understand that any DNA, which comprises a nucleotide sequences or a partial nucleotide sequence encoding a protein that elicits an immune response therefore encodes an “antigen” as that term is used herein. Furthermore, one skilled in the art will understand that an antigen need not be encoded solely by a full length nucleotide sequence of a gene. It is readily apparent that the present invention includes, but is not limited to, the use of partial nucleotide sequences of more than one gene and that these nucleotide sequences are arranged in various combinations to encode polypeptides that elicit the desired immune response. Moreover, a skilled artisan will understand that an antigen need not be encoded by a “gene” at all. It is readily apparent that an antigen can be generated synthesized or can be derived from a biological sample, or might be macromolecule besides a polypeptide. Such a biological sample can include, but is not limited to a tissue sample, a tumor sample, a cell or a fluid with other biological components.

[0247] The term “anti-cancer effect” refers to a biological effect which can be manifested by various means, including but not limited to, e.g., a decrease in tumor volume, a decrease in the number of cancer cells, a decrease in the number of metastases, an increase in life expectancy, decrease in cancer cell proliferation, decrease in cancer cell survival, or amelioration of various physiological symptoms associated with the cancerous condition. An “anti-cancer effect” can also be manifested by the ability of the peptides, polynucleotides, cells and antibodies in prevention of the occurrence of cancer in the first place. The term “anti-tumor effect” refers to a biological effect which can be manifested by various means, including but not limited to, e.g., a decrease in tumor volume, a decrease in the number of tumor cells, a decrease in tumor cell proliferation, or a decrease in tumor cell survival.

[0248] The term “autologous” refers to any material derived from the same individual to whom it is later to be re-introduced into the individual.

[0249] The term “allogeneic” refers to any material derived from a different animal of the same species as the individual to whom the material is introduced. Two or more individuals are said to be allogeneic to one another when the genes at one or more loci are not identical. In some aspects, allogeneic material from individuals of the same species may be sufficiently unlike genetically to interact antigenically.

[0250] The term “xenogeneic” refers to a graft derived from an animal of a different species. The term “cancer” refers to a disease characterized by the uncontrolled growth of aberrant cells. Cancer cells can spread locally or through the bloodstream and lymphatic system to other parts of the body. Examples of various cancers are described herein and include but are not limited to, breast cancer, prostate cancer, ovarian cancer, cervical cancer, skin cancer, pancreatic cancer, colorectal cancer, renal cancer, liver cancer, brain cancer, lymphoma, leukemia, lung cancer and the like. The terms “tumor” and “cancer” are used interchangeably herein, e.g., both terms encompass solid and liquid, e.g., diffuse or circulating, tumors. As used herein, the term “cancer” or “tumor” includes premalignant, as well as malignant cancers and tumors.

[0251] The terms “cancer associated antigen” or “tumor antigen” or “proliferative disorder antigen” or “antigen associated with a proliferative disorder” interchangeably refers to a molecule (typically protein, carbohydrate or lipid) that is preferentially expressed on the surface of a cancer cell, either entirely or as a fragment (e.g., MHC/peptide), in comparison to a normal cell, and which is useful for the preferential targeting of a pharmacological agent to the cancer cell. In some embodiments, a tumor antigen is a marker expressed by both normal cells and cancer cells, e.g., a lineage marker, e.g., CD19 on B cells. In certain aspects, the tumor antigens of the present invention are derived from, cancers including but not limited to primary or metastatic melanoma, thymoma, lymphoma, sarcoma, lung cancer, liver cancer, non-Hodgkin lymphoma, Hodgkin lymphoma, leukemias, uterine cancer, cervical cancer, bladder cancer, kidney cancer and adenocarcinomas such as breast cancer, prostate cancer, ovarian cancer, pancreatic cancer, and the like. In some embodiments, the tumor antigen is an antigen that is common to a specific proliferative disorder. In some embodiments, a cancer-associated antigen is a cell surface molecule that is overexpressed in a cancer cell in comparison to a normal cell, for instance, 1-fold over expression, 2-fold overexpression, 3-fold overexpression or more in comparison to a normal cell. In some embodiments, a cancer-associated antigen is a cell surface molecule that is inappropriately synthesized in the cancer cell, for instance, a molecule that contains deletions, additions or mutations in comparison to the molecule expressed on a normal cell. In some embodiments, a cancer-associated antigen will be expressed exclusively on the cell surface of a cancer cell, entirely or as a fragment (e.g., MHC/peptide), and not synthesized or expressed on the surface of a normal cell. In some embodiments, the CARs of the present invention includes CARs comprising an antigen binding domain (e.g., antibody or antibody fragment) that binds to a MHC presented peptide. Normally, peptides derived from endogenous proteins fill the pockets of Major histocompatibility complex (MHC) class I molecules, and are recognized by T cell receptors (TCRs) on CD8 + T lymphocytes. The MHC class I complexes are constitutively expressed by all nucleated cells. In cancer, virus-specific and/or tumor-specific peptide/MHC complexes represent a unique class of cell surface targets for immunotherapy. TCR-like antibodies targeting peptides derived from viral or tumor antigens in the context of human leukocyte antigen (HLA)-A1 or HLA-A2 have been described (see, e.g., Sastry et al., J Virol. 2011 85(5):1935-1942; Sergeeva et al., Bood, 2011 117(16):4262-4272; Verma et al., J Immunol 2010 184(4):2156-2165; Willemsen et al., Gene Ther 2001 8(21) :1601-1608 ; Dao et al., Sci Transl Med 2013 5(176) :176ra33 ; Tassev et al., Cancer Gene Ther 2012 19(2):84-100). For example, TCR-like antibody can be identified from screening a library, such as a human scFv phage displayed library.

[0252] The phrase “disease associated with expression of CD19” includes, but is not limited to, a disease associated with expression of CD19 (e.g., wild-type or mutant CD19) or condition associated with cells which express, or at any time expressed, CD19 (e.g., wild-type or mutant CD19) including, e.g., proliferative diseases such as a cancer or malignancy or a precancerous condition such as a myelodysplasia, a myelodysplastic syndrome or a preleukemia; or a noncancer related indication associated with cells which express CD19. For the avoidance of doubt, a disease associated with expression of CD19 may include a condition associated with cells which do not presently express CD19, e.g., because CD19 expression has been downregulated, e.g., due to treatment with a molecule targeting CD19, e.g., a CD19 CAR, but which at one time expressed CD19. In one aspect, a cancer associated with expression of CD19 is a hematological cancer. In one aspect, the hematological cancer is a leukemia or a lymphoma. In one aspect, a cancer associated with expression of CD19 includes cancers and malignancies including, but not limited to, e.g., one or more acute leukemias including but not limited to, e.g., B-cell acute Lymphoid Leukemia (BALL), T-cell acute Lymphoid Leukemia (TALL), acute lymphoid leukemia (ALL); one or more chronic leukemias including but not limited to, e.g., chronic myelogenous leukemia (CML), Chronic Lymphoid Leukemia (CLL). Additional cancers or hematologic conditions associated with expression of CD19 comprise, but are not limited to, e.g., B cell prolymphocytic leukemia, blastic plasmacytoid dendritic cell neoplasm, Burkitt's lymphoma, diffuse large B cell lymphoma, Follicular lymphoma, Hairy cell leukemia, small cell- or a large cell-follicular lymphoma, malignant lymphoproliferative conditions, MALT lymphoma, mantle cell lymphoma (MCL), Marginal zone lymphoma, multiple myeloma, myelodysplasia and myelodysplastic syndrome, non-Hodgkin lymphoma, Hodgkin lymphoma, plasmablastic lymphoma, plasmacytoid dendritic cell neoplasm, Waldenstrom macroglobulinemia, and “preleukemia” which are a diverse collection of hematological conditions united by ineffective production (or dysplasia) of myeloid blood cells, and the like. Further diseases associated with expression of CD19 expression include, but not limited to, e.g., atypical and/or non-classical cancers, malignancies, precancerous conditions or proliferative diseases associated with expression of CD19. Non-cancer related indications associated with expression of CD19 include, but are not limited to, e.g., autoimmune disease, (e.g., lupus), inflammatory disorders (allergy and asthma) and transplantation. In some embodiments, the CD19-expressing cells express, or at any time expressed, CD19 mRNA. In an embodiment, the CD19-expressing cells produce a CD19 protein (e.g., wild-type or mutant), and the CD19 protein may be present at normal levels or reduced levels. In an embodiment, the CD19-expressing cells produced detectable levels of a CD19 protein at one point, and subsequently produced substantially no detectable CD19 protein.

[0253] As used herein, the term “Programmed Death 1” or “PD-1” include isoforms, mammalian, e.g., human PD-1, species homologs of human PD-1, and analogs comprising at least one common epitope with PD-1. The amino acid sequence of PD-1, e.g., human PD-1, is known in the art, e.g., Shinohara T et al. (1994) Genomics 23(3):704-6; Finger L R, et al. Gene (1997) 197(1-2):177-87.

[0254] The term “conservative sequence modifications” refers to amino acid modifications that do not significantly affect or alter the binding characteristics of the antibody or antibody fragment containing the amino acid sequence. Such conservative modifications include amino acid substitutions, additions and deletions. Modifications can be introduced into an antibody or antibody fragment of the invention by standard techniques known in the art, such as site-directed mutagenesis and PCR-mediated mutagenesis. Conservative amino acid substitutions are ones in which the amino acid residue is replaced with an amino acid residue having a similar side chain. Families of amino acid residues having similar side chains have been defined in the art. These families include amino acids with basic side chains (e.g., lysine, arginine, histidine), acidic side chains (e.g., aspartic acid, glutamic acid), uncharged polar side chains (e.g., glycine, asparagine, glutamine, serine, threonine, tyrosine, cysteine, tryptophan), nonpolar side chains (e.g., alanine, valine, leucine, isoleucine, proline, phenylalanine, methionine), beta-branched side chains (e.g., threonine, valine, isoleucine) and aromatic side chains (e.g., tyrosine, phenylalanine, tryptophan, histidine). Thus, one or more amino acid residues within a CAR of the invention can be replaced with other amino acid residues from the same side chain family and the altered CAR can be tested, e.g., for the ability to bind CD19 using the functional assays described herein.

[0255] The term “stimulation,” refers to a primary response induced by binding of a stimulatory molecule (e.g., a TCR/CD3 complex or CAR) with its cognate ligand (or tumor antigen in the case of a CAR) thereby mediating a signal transduction event, such as, but not limited to, signal transduction via the TCR/CD3 complex or signal transduction via the appropriate NK receptor or signaling domains of the CAR. Stimulation can mediate altered expression of certain molecules, such as downregulation of TGF-β, and/or reorganization of cytoskeletal structures, and the like.

[0256] The term “stimulatory molecule,” refers to a molecule expressed by an immune effector cell (e.g., a T cell, NK cell, B cell) that provides the cytoplasmic signaling sequence(s) that regulate activation of the immune effector cell in a stimulatory way for at least some aspect of the immune effector cell signaling pathway, e.g., the T cell signaling pathway. In one aspect, the signal is a primary signal that is initiated by, for instance, binding of a TCR/CD3 complex with an MHC molecule loaded with peptide, and which leads to mediation of a T cell response, including, but not limited to, proliferation, activation, differentiation, and the like. A primary cytoplasmic signaling sequence (also referred to as a “primary signaling domain”) that acts in a stimulatory manner may contain a signaling motif which is known as immunoreceptor tyrosine-based activation motif or ITAM. Examples of an ITAM containing primary cytoplasmic signaling sequence that is of particular use in the invention includes, but is not limited to, those derived from CD3 zeta, common FcR gamma (FCER1G), Fc gamma RIIa, FcR beta (Fc epsilon R1b), CD3 gamma, CD3 delta , CD3 epsilon, CD5, CD22, CD79a, CD79b, CD278 (also known as “ICOS”), FcεRI, DAP10, DAP12, and CD66d. In a specific CAR of the invention, the intracellular signaling domain in any one or more CARs of the invention comprises an intracellular signaling sequence, e.g., a primary signaling sequence of CD3-zeta. In a specific CAR of the invention, the primary signaling sequence of CD3-zeta is the amino acid sequence provided as SEQ ID NO: 9, or the equivalent residues from a non-human species, e.g., mouse, rodent, monkey, ape and the like. In a specific CAR of the invention, the primary signaling sequence of CD3-zeta is the amino acid sequence as provided in SEQ ID NO: 10, or the equivalent residues from a non-human species, e.g., mouse, rodent, monkey, ape and the like.

[0257] The term “antigen presenting cell” or “APC” refers to an immune system cell such as an accessory cell (e.g., a B-cell, a dendritic cell, and the like) that displays a foreign antigen complexed with major histocompatibility complexes (MHC's) on its surface. T-cells may recognize these complexes using their T-cell receptors (TCRs). APCs process antigens and present them to T-cells.

[0258] An “intracellular signaling domain,” as the term is used herein, refers to an intracellular portion of a molecule. The intracellular signaling domain generates a signal that promotes an immune effector function of the CAR-expressingcell, e.g., a CART cell or CAR-expressing NK cell. Examples of immune effector function, e.g., in a CART cell or CAR-expressing NK cell, include cytolytic activity and helper activity, including the secretion of cytokines. While the entire intracellular signaling domain can be employed, in many cases it is not necessary to use the entire chain. To the extent that a truncated portion of the intracellular signaling domain is used, such truncated portion may be used in place of the intact chain as long as it transduces the effector function signal. The term intracellular signaling domain is thus meant to include any truncated portion of the intracellular signaling domain sufficient to transduce the effector function signal.

[0259] In an embodiment, the intracellular signaling domain can comprise a primary intracellular signaling domain. Exemplary primary intracellular signaling domains include those derived from the molecules responsible for primary stimulation, or antigen dependent simulation. In an embodiment, the intracellular signaling domain can comprise a costimulatory intracellular domain. Exemplary costimulatory intracellular signaling domains include those derived from molecules responsible for costimulatory signals, or antigen independent stimulation. In an embodiment, the intracellular signaling domain is synthesized or engineered. For example, in the case of a CAR-expressing immune effector cell, e.g., CART cell or CAR-expressing NK cell, a primary intracellular signaling domain can comprise a cytoplasmic sequence of a T cell receptor, a primary intracellular signaling domain can comprise a cytoplasmic sequence of a T cell receptor, and a costimulatory intracellular signaling domain can comprise cytoplasmic sequence from co-receptor or costimulatory molecule.

[0260] A primary intracellular signaling domain can comprise a signaling motif which is known as an immunoreceptor tyrosine-based activation motif or ITAM. Examples of ITAM containing primary cytoplasmic signaling sequences include, but are not limited to, those derived from CD3 zeta, common FcR gamma (FCER1G), Fc gamma RIIa, FcR beta, CD3 gamma, CD3 delta, CD3 epsilon, CDS, CD22, CD79a, CD79b, CD278 (“ICOS”), FcεRI CD66d, DAP10 and DAP12.

[0261] The term “zeta” or alternatively “zeta chain”, “CD3-zeta” or “TCR-zeta” is defined as the protein provided as GenBan Acc. No. BAG36664.1, or the equivalent residues from a non-human species, e.g., mouse, rodent, monkey, ape and the like, and a “zeta stimulatory domain” or alternatively a “CD3-zeta stimulatory domain” or a “TCR-zeta stimulatory domain” is defined as the amino acid residues from the cytoplasmic domain of the zeta chain that are sufficient to functionally transmit an initial signal necessary for T cell activation. In one aspect the cytoplasmic domain of zeta comprises residues 52 through 164 of GenBank Acc. No. BAG36664.1 or the equivalent residues from a non-human species, e.g., mouse, rodent, monkey, ape and the like, that are functional orthologs thereof. In one aspect, the “zeta stimulatory domain” or a “CD3-zeta stimulatory domain” is the sequence provided as SEQ ID NO:10. In one aspect, the “zeta stimulatory domain” or a “CD3-zeta stimulatory domain” is the sequence provided as SEQ ID NO:9. Also encompassed herein are CD3 zeta domains comprising one or more mutations to the amino acid sequences described herein, e.g., SEQ ID NO: 9.

[0262] The term “costimulatory molecule” refers to the cognate binding partner on a T cell that specifically binds with a costimulatory ligand, thereby mediating a costimulatory response by the T cell, such as, but not limited to, proliferation. Costimulatory molecules are cell surface molecules other than antigen receptors or their ligands that are required for an efficient immune response. Costimulatory molecules include, but are not limited to an MHC class I molecule, a TNF receptor protein, an Immunoglobulin-like protein, a cytokine receptor, an integrin, a signaling lymphocytic activation molecule (SLAM protein), an activating NK cell receptor, BTLA, a Toll ligand receptor, OX40, CD2, CD7, CD27, CD28, CD30, CD40, CDS, ICAM-1, LFA-1 (CD11a/CD18), 4-1BB (CD137), B7-H3, CDS, ICAM-1, ICOS (CD278), GITR, BAFFR, LIGHT, HVEM (LIGHTR), KIRDS2, SLAMF7, NKp80 (KLRF1), NKp44, NKp30, NKp46, CD19, CD4, CD8alpha, CD8beta, IL2R beta, IL2R gamma, IL7R alpha, ITGA4, VLA1, CD49a, ITGA4, IA4, CD49D, ITGA6, VLA-6, CD49f, ITGAD, CD11d, ITGAE, CD103, ITGAL, CD11a, LFA-1, ITGAM, CD11b, ITGAX, CD11c, ITGB1, CD29, ITGB2, CD18, LFA-1, ITGB7, NKG2D, NKG2C, TNFR2, TRANCE/RANKL, DNAM1 (CD226), SLAMF4 (CD244, 2B4), CD84, CD96 (Tactile), CEACAM1, CRTAM, Ly9 (CD229), CD160 (BY55), PSGL1, CD100 (SEMA4D), CD69, SLAMF6 (NTB-A, Ly108), SLAM (SLAMF1, CD150, IPO-3), BLAME (SLAMF8), SELPLG (CD162), LTBR, LAT, GADS, SLP-76, PAG/Cbp, CD19a, and a ligand that specifically binds with CD83.

[0263] A costimulatory intracellular signaling domain can be the intracellular portion of a costimulatory molecule. The intracellular signaling domain can comprise the entire intracellular portion, or the entire native intracellular signaling domain, of the molecule from which it is derived, or a functional fragment thereof.

[0264] The term “4-1BB” refers to a member of the TNFR superfamily with an amino acid sequence provided as GenBank Acc. No. AAA62478.2, or the equivalent residues from a non-human species, e.g., mouse, rodent, monkey, ape and the like; and a “4-1BB costimulatory domain” is defined as amino acid residues 214-255 of GenBank Acc. No. AAA62478.2, or the equivalent residues from a non-human species, e.g., mouse, rodent, monkey, ape and the like. In one aspect, the “4-1BB costimulatory domain” is the sequence provided as SEQ ID NO:7 or the equivalent residues from a non-human species, e.g., mouse, rodent, monkey, ape and the like.

[0265] “Immune effector cell,” as that term is used herein, refers to a cell that is involved in an immune response, e.g., in the promotion of an immune effector response. Examples of immune effector cells include T cells, e.g., alpha/beta T cells and gamma/delta T cells, B cells, natural killer (NK) cells, natural killer T (NKT) cells, mast cells, and myeloid-derived phagocytes.

[0266] “Immune effector function or immune effector response,” as that term is used herein, refers to function or response, e.g., of an immune effector cell, that enhances or promotes an immune attack of a target cell. E.g., an immune effector function or response refers a property of a T or NK cell that promotes killing or the inhibition of growth or proliferation, of a target cell. In the case of a T cell, primary stimulation and co-stimulation are examples of immune effector function or response.

[0267] The term “effector function” refers to a specialized function of a cell. Effector function of a T cell, for example, may be cytolytic activity or helper activity including the secretion of cytokines.

[0268] The term “encoding” refers to the inherent property of specific sequences of nucleotides in a polynucleotide, such as a gene, a cDNA, or an mRNA, to serve as templates for synthesis of other polymers and macromolecules in biological processes having either a defined sequence of nucleotides (i.e., rRNA, tRNA and mRNA) or a defined sequence of amino acids and the biological properties resulting therefrom. Thus, a gene, cDNA, or RNA, encodes a protein if transcription and translation of mRNA corresponding to that gene produces the protein in a cell or other biological system. Both the coding strand, the nucleotide sequence of which is identical to the mRNA sequence and is usually provided in sequence listings, and the non-coding strand, used as the template for transcription of a gene or cDNA, can be referred to as encoding the protein or other product of that gene or cDNA.

[0269] Unless otherwise specified, a “nucleotide sequence encoding an amino acid sequence” includes all nucleotide sequences that are degenerate versions of each other and that encode the same amino acid sequence. The phrase nucleotide sequence that encodes a protein or a RNA may also include introns to the extent that the nucleotide sequence encoding the protein may in some version contain an intron(s).

[0270] The term “effective amount” or “therapeutically effective amount” is used interchangeably herein, and refer to an amount of a compound, formulation, material, or composition, as described herein effective to achieve a particular biological result.

[0271] The term “endogenous” refers to any material from or produced inside an organism, cell, tissue or system.

[0272] The term “exogenous” refers to any material introduced from or produced outside an organism, cell, tissue or system.

[0273] The term “expression” refers to the transcription and/or translation of a particular nucleotide sequence driven by its promoter.

[0274] The term “transfer vector” refers to a composition of matter which comprises an isolated nucleic acid and which can be used to deliver the isolated nucleic acid to the interior of a cell. Numerous vectors are known in the art including, but not limited to, linear polynucleotides, polynucleotides associated with ionic or amphiphilic compounds, plasmids, and viruses. Thus, the term “transfer vector” includes an autonomously replicating plasmid or a virus. The term should also be construed to further include non-plasmid and non-viral compounds which facilitate transfer of nucleic acid into cells, such as, for example, a polylysine compound, liposome, and the like. Examples of viral transfer vectors include, but are not limited to, adenoviral vectors, adeno-associated virus vectors, retroviral vectors, lentiviral vectors, and the like.

[0275] The term “expression vector” refers to a vector comprising a recombinant polynucleotide comprising expression control sequences operatively linked to a nucleotide sequence to be expressed. An expression vector comprises sufficient cis-acting elements for expression; other elements for expression can be supplied by the host cell or in an in vitro expression system. Expression vectors include all those known in the art, including cosmids, plasmids (e.g., naked or contained in liposomes) and viruses (e.g., lentiviruses, retroviruses, adenoviruses, and adeno-associated viruses) that incorporate the recombinant polynucleotide.

[0276] The term “lentivirus” refers to a genus of the Retroviridae family. Lentiviruses are unique among the retroviruses in being able to infect non-dividing cells; they can deliver a significant amount of genetic information into the DNA of the host cell, so they are one of the most efficient methods of a gene delivery vector. HIV, SIV, and FIV are all examples of lentiviruses.

[0277] The term “lentiviral vector” refers to a vector derived from at least a portion of a lentivirus genome, including especially a self-inactivating lentiviral vector as provided in Milone et al., Mol. Ther. 17(8): 1453-1464 (2009). Other examples of lentivirus vectors that may be used in the clinic include but are not limited to, e.g., the LENTIVECTOR® gene delivery technology from Oxford BioMedica, the LENTIMAX™ vector system from Lentigen and the like. Nonclinical types of lentiviral vectors are also available and would be known to one skilled in the art.

[0278] The term “homologous” or “identity” refers to the subunit sequence identity between two polymeric molecules, e.g., between two nucleic acid molecules, such as, two DNA molecules or two RNA molecules, or between two polypeptide molecules. When a subunit position in both of the two molecules is occupied by the same monomeric subunit; e.g., if a position in each of two DNA molecules is occupied by adenine, then they are homologous or identical at that position. The homology between two sequences is a direct function of the number of matching or homologous positions; e.g., if half (e.g., five positions in a polymer ten subunits in length) of the positions in two sequences are homologous, the two sequences are 50% homologous; if 90% of the positions (e.g., 9 of 10), are matched or homologous, the two sequences are 90% homologous.

[0279] The term “humanized” refers to those forms of non-human (e.g., murine) antibodies are chimeric immunoglobulins, immunoglobulin chains or fragments thereof (such as Fv, Fab, Fab′, F(ab′)2 or other antigen-binding subsequences of antibodies) which contain minimal sequence derived from non-human immunoglobulin. For the most part, humanized antibodies and antibody fragments thereof are human immunoglobulins (recipient antibody or antibody fragment) in which residues from a complementary-determining region (CDR) of the recipient are replaced by residues from a CDR of a non-human species (donor antibody) such as mouse, rat or rabbit having the desired specificity, affinity, and capacity. In some instances, Fv framework region (FR) residues of the human immunoglobulin are replaced by corresponding non-human residues. Furthermore, a humanized antibody/antibody fragment can comprise residues which are found neither in the recipient antibody nor in the imported CDR or framework sequences. These modifications can further refine and optimize antibody or antibody fragment performance. In general, the humanized antibody or antibody fragment thereof will comprise a significant portion of at least one, and typically two, variable domains, in which all or substantially all of the CDR regions correspond to those of a non-human immunoglobulin and all or substantially all of the FR regions are those of a human immunoglobulin sequence. The humanized antibody or antibody fragment can also comprise at least a portion of an immunoglobulin constant region (Fc), typically that of a human immunoglobulin. For further details, see Jones et al., Nature, 321: 522-525, 1986; Reichmann et al., Nature, 332: 323-329, 1988; Presta, Curr. Op. Struct. Biol., 2: 593-596, 1992.

[0280] The term “fully human” refers to an immunoglobulin, such as an antibody or antibody fragment, where the whole molecule is of human origin or consists of an amino acid sequence identical to a human form of the antibody or immunoglobulin.

[0281] The term “isolated” means altered or removed from the natural state. For example, a nucleic acid or a peptide naturally present in a living animal is not “isolated,” but the same nucleic acid or peptide partially or completely separated from the coexisting materials of its natural state is “isolated.” An isolated nucleic acid or protein can exist in substantially purified form, or can exist in a non-native environment such as, for example, a host cell.

[0282] In the context of the present invention, the following abbreviations for the commonly occurring nucleic acid bases are used. “A” refers to adenosine, “C” refers to cytosine, “G” refers to guanosine, “T” refers to thymidine, and “U” refers to uridine.

[0283] The term “operably linked” or “transcriptional control” refers to functional linkage between a regulatory sequence and a heterologous nucleic acid sequence resulting in expression of the latter. For example, a first nucleic acid sequence is operably linked with a second nucleic acid sequence when the first nucleic acid sequence is placed in a functional relationship with the second nucleic acid sequence. For instance, a promoter is operably linked to a coding sequence if the promoter affects the transcription or expression of the coding sequence. Operably linked DNA sequences can be contiguous with each other and, where necessary to join two protein coding regions, are in the same reading frame.

[0284] The term “parenteral” administration of an immunogenic composition includes, e.g., subcutaneous (s.c.), intravenous (i.v.), intramuscular (i.m.), or intrasternal injection, intratumoral, or infusion techniques.

[0285] The term “nucleic acid” or “polynucleotide” refers to deoxyribonucleic acids (DNA) or ribonucleic acids (RNA) and polymers thereof in either single- or double-stranded form. Unless specifically limited, the term encompasses nucleic acids containing known analogues of natural nucleotides that have similar binding properties as the reference nucleic acid and are metabolized in a manner similar to naturally occurring nucleotides. Unless otherwise indicated, a particular nucleic acid sequence also implicitly encompasses conservatively modified variants thereof (e.g., degenerate codon substitutions), alleles, orthologs, SNPs, and complementary sequences as well as the sequence explicitly indicated. Specifically, degenerate codon substitutions may be achieved by generating sequences in which the third position of one or more selected (or all) codons is substituted with mixed-base and/or deoxyinosine residues (Batzer et al., Nucleic Acid Res. 19:5081 (1991); Ohtsuka et al., J. Biol. Chem. 260:2605-2608 (1985); and Rossolini et al., Mol. Cell. Probes 8:91-98 (1994)).

[0286] The terms “peptide,” “polypeptide,” and “protein” are used interchangeably, and refer to a compound comprised of amino acid residues covalently linked by peptide bonds. A protein or peptide must contain at least two amino acids, and no limitation is placed on the maximum number of amino acids that can comprise a protein's or peptide's sequence. Polypeptides include any peptide or protein comprising two or more amino acids joined to each other by peptide bonds. As used herein, the term refers to both short chains, which also commonly are referred to in the art as peptides, oligopeptides and oligomers, for example, and to longer chains, which generally are referred to in the art as proteins, of which there are many types. “Polypeptides” include, for example, biologically active fragments, substantially homologous polypeptides, oligopeptides, homodimers, heterodimers, variants of polypeptides, modified polypeptides, derivatives, analogs, fusion proteins, among others. A polypeptide includes a natural peptide, a recombinant peptide, a recombinant peptide, or a combination thereof.

[0287] The term “promoter” refers to a DNA sequence recognized by the synthetic machinery of the cell, or introduced synthetic machinery, required to initiate the specific transcription of a polynucleotide sequence.

[0288] The term “promoter/regulatory sequence” refers to a nucleic acid sequence which is required for expression of a gene product operably linked to the promoter/regulatory sequence. In some instances, this sequence may be the core promoter sequence and in other instances, this sequence may also include an enhancer sequence and other regulatory elements which are required for expression of the gene product. The promoter/regulatory sequence may, for example, be one which expresses the gene product in a tissue specific manner.

[0289] The term “constitutive” promoter refers to a nucleotide sequence which, when operably linked with a polynucleotide which encodes or specifies a gene product, causes the gene product to be produced in a cell under most or all physiological conditions of the cell.

[0290] The term “inducible” promoter refers to a nucleotide sequence which, when operably linked with a polynucleotide which encodes or specifies a gene product, causes the gene product to be produced in a cell substantially only when an inducer which corresponds to the promoter is present in the cell.

[0291] The term “tissue-specific” promoter refers to a nucleotide sequence which, when operably linked with a polynucleotide encodes or specified by a gene, causes the gene product to be produced in a cell substantially only if the cell is a cell of the tissue type corresponding to the promoter.

[0292] The term “flexible polypeptide linker” or “linker” as used in the context of a scFv refers to a peptide linker that consists of amino acids such as glycine and/or serine residues used alone or in combination, to link variable heavy and variable light chain regions together. In one embodiment, the flexible polypeptide linker is a Gly/Ser linker and comprises the amino acid sequence (Gly-Gly-Gly-Ser)ₙ, where n is a positive integer equal to or greater than 1 (SEQ ID NO: 40). For example, n=1, n=2, n=3, n=4, n=5 and n=6, n=7, n=8, n=9 and n=10 (SEQ ID NO:41). In one embodiment, the flexible polypeptide linkers include, but are not limited to, (Gly₄ Ser)₄ (SEQ ID NO:27) or (Gly₄ Ser)₃ (SEQ ID NO:28). In another embodiment, the linkers include multiple repeats of (Gly₂Ser), (GlySer) or (Gly₃Ser) (SEQ ID NO:29). Also included within the scope of the invention are linkers described in WO2012/138475, incorporated herein by reference).

[0293] As used herein, a 5′ cap (also termed an RNA cap, an RNA 7-methylguanosine cap or an RNA m⁷G cap) is a modified guanine nucleotide that has been added to the “front” or 5′ end of a eukaryotic messenger RNA shortly after the start of transcription. The 5′ cap consists of a terminal group which is linked to the first transcribed nucleotide. Its presence is critical for recognition by the ribosome and protection from RNases. Cap addition is coupled to transcription, and occurs co-transcriptionally, such that each influences the other. Shortly after the start of transcription, the 5′ end of the mRNA being synthesized is bound by a cap-synthesizing complex associated with RNA polymerase. This enzymatic complex catalyzes the chemical reactions that are required for mRNA capping. Synthesis proceeds as a multi-step biochemical reaction. The capping moiety can be modified to modulate functionality of mRNA such as its stability or efficiency of translation.

[0294] As used herein, “in vitro transcribed RNA” refers to RNA, preferably mRNA, that has been synthesized in vitro. Generally, the in vitro transcribed RNA is generated from an in vitro transcription vector. The in vitro transcription vector comprises a template that is used to generate the in vitro transcribed RNA.

[0295] As used herein, a “poly(A)” is a series of adenosines attached by polyadenylation to the mRNA. In the preferred embodiment of a construct for transient expression, the polyA is between 50 and 5000 (SEQ ID NO: 30), preferably greater than 64, more preferably greater than 100, most preferably greater than 300 or 400. poly(A) sequences can be modified chemically or enzymatically to modulate mRNA functionality such as localization, stability or efficiency of translation.

[0296] As used herein, “polyadenylation” refers to the covalent linkage of a polyadenylyl moiety, or its modified variant, to a messenger RNA molecule. In eukaryotic organisms, most messenger RNA (mRNA) molecules are polyadenylated at the 3′ end. The 3′ poly(A) tail is a long sequence of adenine nucleotides (often several hundred) added to the pre-mRNA through the action of an enzyme, polyadenylate polymerase. In higher eukaryotes, the poly(A) tail is added onto transcripts that contain a specific sequence, the polyadenylation signal. The poly(A) tail and the protein bound to it aid in protecting mRNA from degradation by exonucleases. Polyadenylation is also important for transcription termination, export of the mRNA from the nucleus, and translation. Polyadenylation occurs in the nucleus immediately after transcription of DNA into RNA, but additionally can also occur later in the cytoplasm. After transcription has been terminated, the mRNA chain is cleaved through the action of an endonuclease complex associated with RNA polymerase. The cleavage site is usually characterized by the presence of the base sequence AAUAAA near the cleavage site. After the mRNA has been cleaved, adenosine residues are added to the free 3′ end at the cleavage site.

[0297] As used herein, “transient” refers to expression of a non-integrated transgene for a period of hours, days or weeks, wherein the period of time of expression is less than the period of time for expression of the gene if integrated into the genome or contained within a stable plasmid replicon in the host cell.

[0298] As used herein, the terms “treat”, “treatment” and “treating” refer to the reduction or amelioration of the progression, severity and/or duration of a proliferative disorder, or the amelioration of one or more symptoms (preferably, one or more discernible symptoms) of a proliferative disorder resulting from the administration of one or more therapies (e.g., one or more therapeutic agents such as a CAR of the invention). In specific embodiments, the terms “treat”, “treatment” and “treating” refer to the amelioration of at least one measurable physical parameter of a proliferative disorder, such as growth of a tumor, not necessarily discernible by the patient. In other embodiments the terms “treat”, “treatment” and “treating”-refer to the inhibition of the progression of a proliferative disorder, either physically by, e.g., stabilization of a discernible symptom, physiologically by, e.g., stabilization of a physical parameter, or both. In other embodiments the terms “treat”, “treatment” and “treating” refer to the reduction or stabilization of tumor size or cancerous cell count.

[0299] A dosage regimen, e.g., a therapeutic dosage regimen, can include one or more treatment intervals. The dosage regimen can result in at least one beneficial or desired clinical result including, but are not limited to, alleviation of a symptom, diminishment of extent of disease, stabilized (i.e., not worsening) state of disease, delay or slowing of disease progression, amelioration or palliation of the disease state, whether detectable or undetectable.

[0300] As used herein, a “treatment interval” refers to a treatment cycle, for example, a course of administration of a therapeutic agent that can be repeated, e.g., on a regular schedule. In embodiments, a dosage regimen can have one or more periods of no administration of the therapeutic agent in between treatment intervals. For example, a treatment interval can include one dose of a CAR molecule administered in combination with (prior, concurrently or after) administration of a second therapeutic agent, e.g., an inhibitor (e.g., a kinase inhibitor as described herein).

[0301] The term “signal transduction pathway” refers to the biochemical relationship between a variety of signal transduction molecules that play a role in the transmission of a signal from one portion of a cell to another portion of a cell. The phrase “cell surface receptor” includes molecules and complexes of molecules capable of receiving a signal and transmitting signal across the membrane of a cell.

[0302] The term “subject” is intended to include living organisms in which an immune response can be elicited (e.g., mammals, human). In an embodiment, a subject is a mammal. In an embodiment, a subject is a human. In an embodiment, a subject is a patient. In one embodiment, the subject is a pedriatic subject. In other embodiments, the subject is an adult.

[0303] The term a “substantially purified” cell refers to a cell that is essentially free of other cell types. A substantially purified cell also refers to a cell which has been separated from other cell types with which it is normally associated in its naturally occurring state. In some instances, a population of substantially purified cells refers to a homogenous population of cells. In other instances, this term refers simply to cell that have been separated from the cells with which they are naturally associated in their natural state. In some aspects, the cells are cultured in vitro. In other aspects, the cells are not cultured in vitro.

[0304] The term “therapeutic” as used herein means a treatment. A therapeutic effect is obtained by reduction, suppression, remission, or eradication of a disease state.

[0305] The term “prophylaxis” as used herein means the prevention of or protective treatment for a disease or disease state.

[0306] The term “transfected” or “transformed” or “transduced” refers to a process by which exogenous nucleic acid is transferred or introduced into the host cell. A “transfected” or “transformed” or “transduced” cell is one which has been transfected, transformed or transduced with exogenous nucleic acid. The cell includes the primary subject cell and its progeny.

[0307] The term “specifically binds,” refers to an antibody, or a ligand, which recognizes and binds with a binding partner (e.g., tumor antigen) protein present in a sample, but which antibody or ligand does not substantially recognize or bind other molecules in the sample.

[0308] “Regulatable chimeric antigen receptor (RCAR),”as used herein, refers to a set of polypeptides, typically two in the simplest embodiments, which when in an immune effector cell, provides the cell with specificity for a target cell, typically a cancer cell, and with regulatable intracellular signal generation. In some embodiments, an RCAR comprises at least an extracellular antigen binding domain, a transmembrane and a cytoplasmic signaling domain (also referred to herein as “an intracellular signaling domain”) comprising a functional signaling domain derived from a stimulatory molecule and/or costimulatory molecule as defined herein in the context of a CAR molecule. In some embodiments, the set of polypeptides in the RCAR are not contiguous with each other, e.g., are in different polypeptide chains. In some embodiments, the RCAR includes a dimerization switch that, upon the presence of a dimerization molecule, can couple the polypeptides to one another, e.g., can couple an antigen binding domain to an intracellular signaling domain. In some embodiments, the RCAR is expressed in a cell (e.g., an immune effector cell) as described herein, e.g., an RCAR-expressing cell (also referred to herein as “RCARX cell”). In an embodiment the RCARX cell is a T cell, and is referred to as a RCART cell. In an embodiment the RCARX cell is an NK cell, and is referred to as a RCARN cell. The RCAR can provide the RCAR-expressing cell with specificity for a target cell, typically a cancer cell, and with regulatable intracellular signal generation or proliferation, which can optimize an immune effector property of the RCAR-expressing cell. In embodiments, an RCAR cell relies at least in part, on an antigen binding domain to provide specificity to a target cell that comprises the antigen bound by the antigen binding domain.

[0309] “Membrane anchor” or “membrane tethering domain”, as that term is used herein, refers to a polypeptide or moiety, e.g., a myristoyl group, sufficient to anchor an extracellular or intracellular domain to the plasma membrane.

[0310] “Switch domain,” as that term is used herein, e.g., when referring to an RCAR, refers to an entity, typically a polypeptide-based entity, that, in the presence of a dimerization molecule, associates with another switch domain. The association results in a functional coupling of a first entity linked to, e.g., fused to, a first switch domain, and a second entity linked to, e.g., fused to, a second switch domain. A first and second switch domain are collectively referred to as a dimerization switch. In embodiments, the first and second switch domains are the same as one another, e.g., they are polypeptides having the same primary amino acid sequence, and are referred to collectively as a homodimerization switch. In embodiments, the first and second switch domains are different from one another, e.g., they are polypeptides having different primary amino acid sequences, and are referred to collectively as a heterodimerization switch. In embodiments, the switch is intracellular. In embodiments, the switch is extracellular. In embodiments, the switch domain is a polypeptide-based entity, e.g., FKBP or FRB-based, and the dimerization molecule is small molecule, e.g., a rapalogue. In embodiments, the switch domain is a polypeptide-based entity, e.g., an scFv that binds a myc peptide, and the dimerization molecule is a polypeptide, a fragment thereof, or a multimer of a polypeptide, e.g., a myc ligand or multimers of a myc ligand that bind to one or more myc scFvs. In embodiments, the switch domain is a polypeptide-based entity, e.g., myc receptor, and the dimerization molecule is an antibody or fragments thereof, e.g., myc antibody.

[0311] “Dimerization molecule,” as that term is used herein, e.g., when referring to an RCAR, refers to a molecule that promotes the association of a first switch domain with a second switch domain. In embodiments, the dimerization molecule does not naturally occur in the subject, or does not occur in concentrations that would result in significant dimerization. In embodiments, the dimerization molecule is a small molecule, e.g., rapamycin or a rapalogue, e.g, RAD001.

[0312] The term “bioequivalent” refers to an amount of an agent other than the reference compound (e.g., RAD001), required to produce an effect equivalent to the effect produced by the reference dose or reference amount of the reference compound (e.g., RAD001). In an embodiment the effect is the level of mTOR inhibition, e.g., as measured by P70 S6 kinase inhibition, e.g., as evaluated in an in vivo or in vitro assay, e.g., as measured by an assay described herein, e.g., the Boulay assay, or measurement of phosphorylated S6 levels by western blot. In an embodiment, the effect is alteration of the ratio of PD-1 positive/PD-1 negative T cells, as measured by cell sorting. In an embodiment a bioequivalent amount or dose of an mTOR inhibitor is the amount or dose that achieves the same level of P70 S6 kinase inhibition as does the reference dose or reference amount of a reference compound. In an embodiment, a bioequivalent amount or dose of an mTOR inhibitor is the amount or dose that achieves the same level of alteration in the ratio of PD-1 positive/PD-1 negative T cells as does the reference dose or reference amount of a reference compound.

[0313] The term “low, immune enhancing, dose” when used in conjuction with an mTOR inhibitor, e.g., an allosteric mTOR inhibitor, e.g., RAD001 or rapamycin, or a catalytic mTOR inhibitor, refers to a dose of mTOR inhibitor that partially, but not fully, inhibits mTOR activity, e.g., as measured by the inhibition of P70 S6 kinase activity. Methods for evaluating mTOR activity, e.g., by inhibition of P70 S6 kinase, are discussed herein. The dose is insufficient to result in complete immune suppression but is sufficient to enhance the immune response. In an embodiment, the low, immune enhancing, dose of mTOR inhibitor results in a decrease in the number of PD-1 positive T cells and/or an increase in the number of PD-1 negative T cells, or an increase in the ratio of PD-1 negative T cells/PD-1 positive T cells. In an embodiment, the low, immune enhancing, dose of mTOR inhibitor results in an increase in the number of naive T cells. In an embodiment, the low, immune enhancing, dose of mTOR inhibitor results in one or more of the following:

[0314] an increase in the expression of one or more of the following markers: CD62L^{high}, CD127^{high}, CD27⁺, and BCL2, e.g., on memory T cells, e.g., memory T cell precursors;

[0315] a decrease in the expression of KLRG1, e.g., on memory T cells, e.g., memory T cell precursors; and

[0316] an increase in the number of memory T cell precursors, e.g., cells with any one or combination of the following characteristics: increased CD62L^{high}, increased CD127^{high}, increased CD27⁺, decreased KLRG1, and increased BCL2;

[0317] wherein any of the changes described above occurs, e.g., at least transiently, e.g., as compared to a non-treated subject.

[0318] “Progressive” as used herein refers to a disease, e.g., cancer, that is progressing or worsening. With solid tumors, e.g., lung cancer, progressive disease typically shows at least 20% growth in size or the tumor or spread of the tumor since the beginning of treatment.

[0319] “Refractory” as used herein refers to a disease, e.g., cancer, that does not respond to a treatment. In embodiments, a refractory cancer can be resistant to a treatment before or at the beginning of the treatment. In other embodiments, the refractory cancer can become resistant during a treatment. A refractory cancer is also called a resistant cancer.

[0320] “Relapsed” or “relapse” as used herein refers to the return or reappearance of a disease (e.g., cancer) or the signs and symptoms of a disease such as cancer after a period of improvement or responsiveness, e.g., after prior treatment of a therapy, e.g., cancer therapy. The initial period of responsiveness may involve the level of cancer cells falling below a certain threshold, e.g., below 20%, 1%, 10%, 5%, 4%, 3%, 2%, or 1%. The reappearance may involve the level of cancer cells rising above a certain threshold, e.g., above 20%, 1%, 10%, 5%, 4%, 3%, 2%, or 1%. For example, e.g., in the context of B-ALL, the reappearance may involve, e.g., a reappearance of blasts in the blood, bone marrow (>5%), or any extramedullary site, after a complete response. A complete response, in this context, may involve <5% BM blast. More generally, in an embodiment, a response (e.g., complete response or partial response) can involve the absence of detectable MRD (minimal residual disease). In an embodiment, the initial period of responsiveness lasts at least 1, 2, 3, 4, 5, or 6 days; at least 1, 2, 3, or 4 weeks; at least 1, 2, 3, 4, 6, 8, 10, or 12 months; or at least 1, 2, 3, 4, or 5 years.

[0321] A “complete response” or “CR” refers to the absence of detectable evidence of disease, e.g., cancer, e.g., a complete remission, to a treatment. A complete response may be identified, e.g., using the NCCN Guidelines®, or Cheson et al, J Clin Oncol 17:1244 (1999) and Cheson et al., “Revised Response Criteria for Malignant Lymphoma”, J Clin Oncol 25:579-586 (2007) (both of which are incorporated by reference herein in their entireties), as described herein. For example, in the context of B-ALL, a complete response may involve <5% BM blasts.

[0322] A “complete responder” as used herein refers to a subject having a disease, e.g., a cancer, who exhibits a complete response, e.g., a complete remission, to a treatment.

[0323] A “partial response” or “PR” refers to a decrease in the disease, e.g., cancer, although, e.g., there is still detectable disease present.

[0324] A “partial responder” as used herein refers to a subject having a disease, e.g., a cancer, who exhibits a partial response, e.g., a partial remission, to a treatment. A partial response may be identified, e.g., using the NCCN Guidelines®, or Cheson criteria as described herein.

[0325] A “non-responder” as used herein refers to a subject having a disease, e.g., a cancer, who does not exhibit a response to a treatment, e.g., the patient has stable disease or progressive disease after administration of a treatment, e.g., a treatment described herein. A non-responder may be identified, e.g., using the NCCN Guidelines®, or Cheson criteria as described herein.

[0326] Several methods can be used to determine if a patient responds to a treatment including, for example, criteria provided by NCCN Clinical Practice Guidelines in Oncology (NCCN Guidelines®). For example, in the context of B-ALL, a complete response or complete responder, may involve one or more of: <5% BM blast, >1000 neutrophil/ANC (/μL). >100,000 platelets (/μL) with no circulating blasts or extramedullary disease (No lymphadenopathy, splenomegaly, skin/gum infiltration/testicular mass/CNS involvement), Trilineage hematopoiesis, and no recurrence for 4 weeks. A partial responder may involve one or more of ≥50% reduction in BM blast, >1000 neutrophil/ANC (/μL). >100,000 platelets (/μL). A non-responder can show disease progression, e.g., >25% in BM blasts.

[0327] Ranges: throughout this disclosure, various aspects of the invention can be presented in a range format. It should be understood that the description in range format is merely for convenience and brevity and should not be construed as an inflexible limitation on the scope of the invention. Accordingly, the description of a range should be considered to have specifically disclosed all the possible subranges as well as individual numerical values within that range. For example, description of a range such as from 1 to 6 should be considered to have specifically disclosed subranges such as from 1 to 3, from 1 to 4, from 1 to 5, from 2 to 4, from 2 to 6, from 3 to 6 etc., as well as individual numbers within that range, for example, 1, 2, 2.7, 3, 4, 5, 5.3, and 6. As another example, a range such as 95-99% identity, includes something with 95%, 96%, 97%, 98%, or 99% identity, and includes subranges such as 96-99%, 96-98%, 96-97%, 97-99%, 97-98%, and 98-99% identity. This applies regardless of the breadth of the range.

### Description

[0328] Provided herein are compositions and methods for treating a disease such as cancer, by administering a cell comprising a chimeric antigen receptor that targets an antigen, e.g., antigen described herein, e.g., CD19, e.g., CD19 CAR, in combination with a PD-1 inhibitor. Exemplary components to generate a CAR molecule, e.g., CD19 CAR and a CAR-expressing cell (e.g., CD19 CAR-expressing cell) are disclosure herein. Exemplary PD-1 inhibitors are also described herein.

[0329] In embodiments, the combination therapy of a CAR-expressing cell (e.g., CD19 CAR-expressing cell) described herein and a PD-1 inhibitor described herein results in one or more of the following: improved or increased anti-tumor activity of the CAR-expressing cell; increased proliferation or persistence of the CAR-expressing cell; improved or increased infiltration of the CAR-expressing cell; improved inhibition of tumor progression; delay of tumor progression; inhibition or reduction in cancer cell proliferation; and/or reduction in tumor burden, e.g., tumor volume, or size. In an embodiment, the combination therapy of a CD19 CAR-expressing cell, e.g., a plurality of CD19 CAR-expressing cells, and a PD-1 inhibitor described herein results in increased or improved persistence of a CD19 CAR-expressing cell, e.g., increased or improved persistence of a plurality of CD19 CAR-expressing cells.

[0330] In some embodiments, administration of the PD-1 inhibitor prior to or subsequent to administration of a CAR-expressing cell (e.g., CD19 CAR-expressing cell) results in increased therapeutic efficacy, e.g., increased inhibition of tumor progression and/or tumor growth, in some cancers, e.g., as compared to administration og the PD-1 inhibitor or CAR-expressing cell alone.

[0331] PD-1 is known to downregulate the immune response, e.g., anti-tumor immune response. PD-1 and/or PD-L1 can also be expressed by cancer cells or cancer associated cells, e.g., tumor infiltrating lymphocytes (TILs). Without wishing to be bound by theory, in some embodiments, a subject that is administered the combination therapy described herein, e.g., a CAR-expressing cell (e.g., CD19 CAR-expressing cell) and a PD-1 inhibitor, is more likely to have increased anti-tumor activity if the subject has one or more of: a cancer that expresses, e.g., highly expresses, PD-1 and/or PD-L1; a cancer that is infiltrated by anti-tumor immune cells, e.g., tumor infiltrating lymphocytes (TILs); and/or cancer-associated cells that express, e.g., highly express, PD-1 and/or PD-L1, as compared to a subject that is not administered the combination therapy, or is administered a CAR-expressing cell or PD-1 inhibitor alone. For example, without wishing to be bound by theory, treatment with a PD-1 inhibitor prevents or reduces the downregulation of the anti-tumor immune response, e.g., exhaustion of anti-tumor immune cells, e.g., TILs, thereby increasing the anti-tumor efficacy of the CAR-expressing cell. Without wishing to be bound by theory, administration of the combination therapy, e.g., a CAR-expressing cell, e.g., a CD19 CAR-expressing cell, and an immune checkpoint inhibitor, e.g., a PD-linhibitor, can reduce exhaustion of T cells leading to improved, e.g., longer, persistence of CAR-expressing cells. In an embodiment, administration of a combination of a CD19 CAR-expressing cell and a PD-1 inhibitor can result in improved, e.g., longer, persistence of CD19 CAR-expressing cells.

### Chimeric Antigen Receptor (CAR)

[0332] The present disclosure encompasses immune effector cells (e.g., T cells or NK cells) comprising a CAR molecule that targets, e.g., specifically binds, to an antigen, e.g., antigen described herein, e.g., CD19 (a CAR, e.g., CD19 CAR). In one embodiment, the immune effector cells are engineered to express the CAR, e.g., CD19 CAR. In one embodiment, the immune effector cells comprise a recombinant nucleic acid construct comprising nucleic acid sequences encoding the CAR, e.g., CD19 CAR.

[0333] In embodiments, the CAR, e.g., CD19 CAR, comprises an antigen binding domain that specifically binds to an antigen, e.g., CD19, e.g., antigen binding domain (e.g., CD19 binding domain), a transmembrane domain, and an intracellular signaling domain. In one embodiment, the sequence of the antigen binding domain is contiguous with and in the same reading frame as a nucleic acid sequence encoding an intracellular signaling domain. The intracellular signaling domain can comprise a costimulatory signaling domain and/or a primary signaling domain, e.g., a zeta chain. The costimulatory signaling domain refers to a portion of the CAR comprising at least a portion of the intracellular domain of a costimulatory molecule.

[0334] Sequences of non-limiting examples of various components that can be part of a CAR molecule (e.g., CD19 CAR molecule) described herein, are listed in Table 1, where “aa” stands for amino acids, and “na” stands for nucleic acids that encode the corresponding peptide.

[0335] In accordance with any method or composition described herein, in embodiments, a CAR molecule comprises a CD123 CAR described herein, e.g., a CD123 CAR described in US2014/0322212A1 or US2016/0068601A1, both incorporated herein by reference. In embodiments, the CD123 CAR comprises an amino acid, or has a nucleotide sequence shown in US2014/0322212A1 or US2016/0068601A1, both incorporated herein by reference. In other embodiments, a CAR molecule comprises a CD19 CAR molecule described herein, e.g., a CD19 CAR molecule described in US-2015-0283178-A1, e.g., CTL019. In embodiments, the CD19 CAR comprises an amino acid, or has a nucleotide sequence shown in US-2015-0283178-A1, incorporated herein by reference. In one embodiment, CAR molecule comprises a BCMA CAR molecule described herein, e.g., a BCMA CAR described in US-2016-0046724-A1. In embodiments, the BCMA CAR comprises an amino acid, or has a nucleotide sequence shown in US-2016-0046724-A1, incorporated herein by reference. In an embodiment, the CAR molecule comprises a CLL1 CAR described herein, e.g., a CLL1 CAR described in US2016/0051651A1, incorporated herein by reference. In embodiments, the CLL1 CAR comprises an amino acid, or has a nucleotide sequence shown in US2016/0051651A1, incorporated herein by reference. In an embodiment, the CAR molecule comprises a CD33 CAR described herein, e.ga CD33 CAR described in US2016/0096892A1, incorporated herein by reference. In embodiments, the CD33 CAR comprises an amino acid, or has a nucleotide sequence shown in US2016/0096892A1, incorporated herein by reference. In an embodiment, the CAR molecule comprises an EGFRvIII CAR molecule described herein, e.g., an EGFRvIII CAR described US2014/0322275A1, incorporated herein by reference. In embodiments, the EGFRvIII CAR comprises an amino acid, or has a nucleotide sequence shown in US2014/0322275A1, incorporated herein by reference. In an embodiment, the CAR molecule comprises a mesothelin CAR described herein, e.g., a mesothelin CAR described in WO 2015/090230, incorporated herein by reference. In embodiments, the mesothelin CAR comprises an amino acid, or has a nucleotide sequence shown in WO 2015/090230, incorporated herein by reference.

TABLE 1
Sequences of various components of CAR
(aa-amino acid sequence, na-nucleic acid sequence)

| SEQ | | |
|---|---|---|
| ID | | |
| NO | Descrip. | Sequence |
| 11 | EF-1 promoter | CGTGAGGCTCCGGTGCCCGTCAGTGGGCAGAGCGCACATCGCCCAC |
| | (na) | AGTCCCCGAGAAGTTGGGGGGAGGGGTCGGCAATTGAACCGGTGCC |
| | | TAGAGAAGGTGGCGCGGGGTAAACTGGGAAAGTGATGTCGTGTACT |
| | | GGCTCCGCCTTTTTCCCGAGGGTGGGGGAGAACCGTATATAAGTGCA |
| | | GTAGTCGCCGTGAACGTTCTTTTTCGCAACGGGTTTGCCGCCAGAAC |
| | | ACAGGTAAGTGCCGTGTGTGGTTCCCGCGGGCCTGGCCTCTTTACGG |
| | | GTTATGGCCCTTGCGTGCCTTGAATTACTTCCACCTGGCTGCAGTACG |
| | | TGATTCTTGATCCCGAGCTTCGGGTTGGAAGTGGGTGGGAGAGTTCG |
| | | AGGCCTTGCGCTTAAGGAGCCCCTTCGCCTCGTGCTTGAGTTGAGGC |
| | | CTGGCCTGGGCGCTGGGGCCGCCGCGTGCGAATCTGGTGGCACCTTC |
| | | GCGCCTGTCTCGCTGCTTTCGATAAGTCTCTAGCCATTTAAAATTTTT |
| | | GATGACCTGCTGCGACGCTTTTTTTCTGGCAAGATAGTCTTGTAAAT |
| | | GCGGGCCAAGATCTGCACACTGGTATTTCGGTTTTTGGGGCCGCGGG |
| | | CGGCGACGGGGCCCGTGCGTCCCAGCGCACATGTTCGGCGAGGCGG |
| | | GGCCTGCGAGCGCGGCCACCGAGAATCGGACGGGGGTAGTCTCAAG |
| | | CTGGCCGGCCTGCTCTGGTGCCTGGCCTCGCGCCGCCGTGTATCGCC |
| | | CCGCCCTGGGCGGCAAGGCTGGCCCGGTCGGCACCAGTTGCGTGAG |
| | | CGGAAAGATGGCCGCTTCCCGGCCCTGCTGCAGGGAGCTCAAAATG |
| | | GAGGACGCGGCGCTCGGGAGAGCGGGCGGGTGAGTCACCCACACAA |
| | | AGGAAAAGGGCCTTTCCGTCCTCAGCCGTCGCTTCATGTGACTCCAC |
| | | GGAGTACCGGGCGCCGTCCAGGCACCTCGATTAGTTCTCGAGCTTTT |
| | | GGAGTACGTCGTCTTTAGGTTGGGGGGAGGGGTTTTATGCGATGGAG |
| | | TTTCCCCACACTGAGTGGGTGGAGACTGAAGTTAGGCCAGCTTGGCA |
| | | CTTGATGTAATTCTCCTTGGAATTTGCCCTTTTTGAGTTTGGATCTTG |
| | | GTTCATTCTCAAGCCTCAGACAGTGGTTCAAAGTTTTTTTCTTCCATT |
| | | TCAGGTGTCGTGA |
| 1 | Leader (aa) | MALPVTALLLPLALLLHAARP |
| 12 | Leader (na) | ATGGCCCTGCCTGTGACAGCCCTGCTGCTGCCTCTGGCTCTGCTGCTG |
| | | CATGCCGCTAGACCC |
| 290 | Leader codon | ATGGCCCTCCCTGTCACCGCCCTGCTGCTTCCGCTGGCTCTTCTGCTC |
| | optimized (na) | CACGCCGCTCGGCCC |
| 2 | CD 8 hinge (aa) | TTTPAPRPPTPAPTIASQPLSLRPEACRPAAGGAVHTRGLDFACD |
| 13 | CD8 hinge (na) | ACCACGACGCCAGCGCCGCGACCACCAACACCGGCGCCCACCATCG |
| | | CGTCGCAGCCCCTGTCCCTGCGCCCAGAGGCGTGCCGGCCAGCGGCG |
| | | GGGGGCGCAGTGCACACGAGGGGGCTGGACTTCGCCTGTGAT |
| 3 | Ig4 hinge (aa) | ESKYGPPCPPCPAPEFLGGPSVFLFPPKPKDTLMISRTPEVTCVVVDVSQ |
| | | EDPEVQFNWYVDGVEVHNAKTKPREEQFNSTYRVVSVLTVLHQDWLN |
| | | GKEYKCKVSNKGLPSSIEKTISKAKGQPREPQVYTLPPSQEEMTKNQVS |
| | | LTCLVKGFYPSDIAVEWESNGQPENNYKTTPPVLDSDGSFFLYSRLTVD |
| | | KSRWQEGNVFSCSVMHEALHNHYTQKSLSLSLGKM |
| 14 | Ig4 hinge (na) | GAGAGCAAGTACGGCCCTCCCTGCCCCCCTTGCCCTGCCCCCGAGTT |
| | | CCTGGGCGGACCCAGCGTGTTCCTGTTCCCCCCCAAGCCCAAGGACA |
| | | CCCTGATGATCAGCCGGACCCCCGAGGTGACCTGTGTGGTGGTGGAC |
| | | GTGTCCCAGGAGGACCCCGAGGTCCAGTTCAACTGGTACGTGGACG |
| | | GCGTGGAGGTGCACAACGCCAAGACCAAGCCCCGGGAGGAGCAGTT |
| | | CAATAGCACCTACCGGGTGGTGTCCGTGCTGACCGTGCTGCACCAGG |
| | | ACTGGCTGAACGGCAAGGAATACAAGTGTAAGGTGTCCAACAAGGG |
| | | CCTGCCCAGCAGCATCGAGAAAACCATCAGCAAGGCCAAGGGCCAG |
| | | CCTCGGGAGCCCCAGGTGTACACCCTGCCCCCTAGCCAAGAGGAGA |
| | | TGACCAAGAACCAGGTGTCCCTGACCTGCCTGGTGAAGGGCTTCTAC |
| | | CCCAGCGACATCGCCGTGGAGTGGGAGAGCAACGGCCAGCCCGAGA |
| | | ACAACTACAAGACCACCCCCCCTGTGCTGGACAGCGACGGCAGCTTC |
| | | TTCCTGTACAGCCGGCTGACCGTGGACAAGAGCCGGTGGCAGGAGG |
| | | GCAACGTCTTTAGCTGCTCCGTGATGCACGAGGCCCTGCACAACCAC |
| | | TACACCCAGAAGAGCCTGAGCCTGTCCCTGGGCAAGATG |
| 4 | IgD hinge (aa) | RWPESPKAQASSVPTAQPQAEGSLAKATTAPATTRNTGRGGEEKKKEK |
| | | EKEEQEERETKTPECPSHTQPLGVYLLTPAVQDLWLRDKATFTCFVVGS |
| | | DLKDAHLTWEVAGKVPTGGVEEGLLERHSNGSQSQHSRLTLPRSLWNA |
| | | GTSVTCTLNHPSLPPQRLMALREPAAQAPVKLSLNLLASSDPPEAASWL |
| | | LCEVSGFSPPNILLMWLEDQREVNTSGFAPARPPPQPGSTTFWAWSVLR |
| | | VPAPPSPQPATYTCVVSHEDSRTLLNASRSLEVSYVTDH |
| 15 | IgD hinge (na) | AGGTGGCCCGAAAGTCCCAAGGCCCAGGCATCTAGTGTTCCTACTGC |
| | | ACAGCCCCAGGCAGAAGGCAGCCTAGCCAAAGCTACTACTGCACCT |
| | | GCCACTACGCGCAATACTGGCCGTGGCGGGGAGGAGAAGAAAAAGG |
| | | AGAAAGAGAAAGAAGAACAGGAAGAGAGGGAGACCAAGACCCCTG |
| | | AATGTCCATCCCATACCCAGCCGCTGGGCGTCTATCTCTTGACTCCC |
| | | GCAGTACAGGACTTGTGGCTTAGAGATAAGGCCACCTTTACATGTTT |
| | | CGTCGTGGGCTCTGACCTGAAGGATGCCCATTTGACTTGGGAGGTTG |
| | | CCGGAAAGGTACCCACAGGGGGGGTTGAGGAAGGGTTGCTGGAGCG |
| | | CCATTCCAATGGCTCTCAGAGCCAGCACTCAAGACTCACCCTTCCGA |
| | | GATCCCTGTGGAACGCCGGGACCTCTGTCACATGTACTCTAAATCAT |
| | | CCTAGCCTGCCCCCACAGCGTCTGATGGCCCTTAGAGAGCCAGCCGC |
| | | CCAGGCACCAGTTAAGCTTAGCCTGAATCTGCTCGCCAGTAGTGATC |
| | | CCCCAGAGGCCGCCAGCTGGCTCTTATGCGAAGTGTCCGGCTTTAGC |
| | | CCGCCCAACATCTTGCTCATGTGGCTGGAGGACCAGCGAGAAGTGA |
| | | ACACCAGCGGCTTCGCTCCAGCCCGGCCCCCACCCCAGCCGGGTTCT |
| | | ACCACATTCTGGGCCTGGAGTGTCTTAAGGGTCCCAGCACCACCTAG |
| | | CCCCCAGCCAGCCACATACACCTGTGTTGTGTCCCATGAAGATAGCA |
| | | GGACCCTGCTAAATGCTTCTAGGAGTCTGGAGGTTTCCTACGTGACT |
| | | GACCATT |
| 6 | CD8 | IYIWAPLAGTCGVLLLSLVITLYC |
| | Transmembrane | |
| | (aa) | |
| 17 | CD8 | ATCTACATCTGGGCGCCCTTGGCCGGGACTTGTGGGGTCCTTCTCCT |
| | Transmembrane | GTCACTGGTTATCACCCTTTACTGC |
| | (na) | |
| 291 | CD8 | ATCTACATTTGGGCCCCTCTGGCTGGTACTTGCGGGGTCCTGCTGCTT |
| | Transmembrane, | TCACTCGTGATCACTCTTTACTGT |
| | codon optimized | |
| | (na) | |
| 7 | 4-1BB | KRGRKKLLYIFKQPFMRPVQTTQEEDGCSCRFPEEEEGGCEL |
| | intracellular | |
| | domain (aa) | |
| 18 | 4-1BB | AAACGGGGCAGAAAGAAACTCCTGTATATATTCAAACAACCATTTAT |
| | intracellular | GAGACCAGTACAAACTACTCAAGAGGAAGATGGCTGTAGCTGCCGA |
| | domain (na) | TTTCCAGAAGAAGAAGAAGGAGGATGTGAACTG |
| 292 | 4-1BB | AAGCGCGGTCGGAAGAAGCTGCTGTACATCTTTAAGCAACCCTTCAT |
| | intracellular | GAGGCCTGTGCAGACTACTCAAGAGGAGGACGGCTGTTCATGCCGG |
| | domain, codon | TTCCCAGAGGAGGAGGAAGGCGGCTGCGAACTG |
| | optimized (na) | |
| 8 | CD27 (aa) | QRRKYRSNKGESPVEPAEPCRYSCPREEEGSTIPIQEDYRKPEPACSP |
| 19 | CD27 (na) | AGGAGTAAGAGGAGCAGGCTCCTGCACAGTGACTACATGAACATGA |
| | | CTCCCCGCCGCCCCGGGCCCACCCGCAAGCATTACCAGCCCTATGCC |
| | | CCACCACGCGACTTCGCAGCCTATCGCTCC |
| 9 | CD3-zeta (aa) | RVKFSRSADAPAYKQGQNQLYNELNLGRREEYDVLDKRRGRDPEMGG |
| | (Q/K mutant) | KPRRKNPQEGLYNELQKDKMAEAYSEIGMKGERRRGKGHDGLYQGLS |
| | | TATKDTYDALHMQALPPR |
| 20 | CD3-zeta (na) | AGAGTGAAGTTCAGCAGGAGCGCAGACGCCCCCGCGTACAAGCAGG |
| | (Q/K mutant) | GCCAGAACCAGCTCTATAACGAGCTCAATCTAGGACGAAGAGAGGA |
| | | GTACGATGTTTTGGACAAGAGACGTGGCCGGGACCCTGAGATGGGG |
| | | GGAAAGCCGAGAAGGAAGAACCCTCAGGAAGGCCTGTACAATGAAC |
| | | TGCAGAAAGATAAGATGGCGGAGGCCTACAGTGAGATTGGGATGAA |
| | | AGGCGAGCGCCGGAGGGGCAAGGGGCACGATGGCCTTTACCAGGGT |
| | | CTCAGTACAGCCACCAAGGACACCTACGACGCCCTTCACATGCAGGC |
| | | CCTGCCCCCTCGC |
| 293 | CD3-zeta, codon | CGCGTGAAATTCAGCCGCAGCGCAGATGCTCCAGCCTACAAGCAGG |
| | optimized (na) | GGCAGAACCAGCTCTACAACGAACTCAATCTTGGTCGGAGAGAGGA |
| | (Q/K mutant) | GTACGACGTGCTGGACAAGCGGAGAGGACGGGACCCAGAAATGGGC |
| | | GGGAAGCCGCGCAGAAAGAATCCCCAAGAGGGCCTGTACAACGAGC |
| | | TCCAAAAGGATAAGATGGCAGAAGCCTATAGCGAGATTGGTATGAA |
| | | AGGGGAACGCAGAAGAGGCAAAGGCCACGACGGACTGTACCAGGG |
| | | ACTCAGCACCGCCACCAAGGACACCTATGACGCTCTTCACATGCAGG |
| | | CCCTGCCGCCTCGG |
| 10 | CD3-zeta (aa) | RVKFSRSADAPAYQQGQNQLYNELNLGRREEYDVLDKRRGRDPEMGG |
| | (NCBI | KPRRKNPQEGLYNELQKDKMAEAYSEIGMKGERRRGKGHDGLYQGLS |
| | Reference | TATKDTYDALHMQALPPR |
| | Sequence | |
| | NM_000734.3) | |
| 21 | CD3-zeta (na) | AGAGTGAAGTTCAGCAGGAGCGCAGACGCCCCCGCGTACCAGCAGG |
| | (NCBI | GCCAGAACCAGCTCTATAACGAGCTCAATCTAGGACGAAGAGAGGA |
| | Reference | GTACGATGTTTTGGACAAGAGACGTGGCCGGGACCCTGAGATGGGG |
| | Sequence | GGAAAGCCGAGAAGGAAGAACCCTCAGGAAGGCCTGTACAATGAAC |
| | NM_000734.3) | TGCAGAAAGATAAGATGGCGGAGGCCTACAGTGAGATTGGGATGAA |
| | | AGGCGAGCGCCGGAGGGGCAAGGGGCACGATGGCCTTTACCAGGGT |
| | | CTCAGTACAGCCACCAAGGACACCTACGACGCCCTTCACATGCAGGC |
| | | CCTGCCCCCTCGC |
| 36 | CD28 | RSKRSRLLHSDYMNMTPRRPGPTRKHYQPYAPPRDFAAYRS |
| | | Intracellular |
| | | domain (amino |
| | | acid sequence) |
| 37 | CD28 | AGGAGTAAGAGGAGCAGGCTCCTGCACAGTGACTACATGAACATGA |
| | Intracellular | CTCCCCGCCGCCCCGGGCCCACCCGCAAGCATTACCAGCCCTATGCC |
| | domain | CCACCACGCGACTTCGCAGCCTATCGCTCC |
| | (nucleotide | |
| | sequence) | |
| 38 | ICOS | TKKKYSSSVHDPNGEYMFMRAVNTAKKSRLTDVTL |
| | Intracellular | |
| | domain (amino | |
| | acid sequence) | |
| 43 | Y to F mutant | TKKKYSSSVHDPNGEFMFMRAVNTAKKSRLTDVTL |
| | ICOS domain | |
| | (aa) | |
| 44 | ICOS | ACAAAAAAGAAGTATTCATCCAGTGTGCACGACCCTAACGGTGAAT |
| | Intracellular | ACATGTTCATGAGAGCAGTGAACACAGCCAAAAAATCCAGACTCAC |
| | domain | AGATGTGACCCTA |
| | (nucleotide | |
| | sequence) | |
| 5 | GS hinge/linker | GGGGSGGGGS |
| | (aa) | |
| 16 | GS hinge/linker | GGTGGCGGAGGTTCTGGAGGTGGAGGTTCC |
| | (na) | |
| 39 | GS hinge/linker | GGTGGCGGAGGTTCTGGAGGTGGGGGTTCC |
| | (na) | |
| 25 | linker | GGGGS |
| 26 | linker | (Gly-Gly-Gly-Gly-Ser)n, where n = 1-6, e.g., GGGGSGGGGS |
| | | GGGGSGGGGS GGGGSGGGGS |
| 27 | linker | (Gly4 Ser)4 |
| 28 | linker | (Gly4 Ser)3 |
| 29 | linker | (Gly3Ser) |
| 40 | linker | (Gly-Gly-Gly-Ser)n where n is a positive integer equal to or greater than 1 |
| 41 | linker | (Gly-Gly-Gly-Ser)n, where n = 1-10, e.g., GGGSGGGSGG GSGGGSGGGS |
| | | GGGSGGGSGG GSGGGSGGGS |
| 42 | linker | GSTSGSGKPGSGEGSTKG |
| 30 | polyA | (A)₅₀₀₀ |
| | | This sequence may encompass 50-5000 adenines. |
| 31 | polyT | (T)₁₀₀ |
| 32 | polyT | (T)₅₀₀₀ |
| | | This sequence may encompass 50-5000 thymines. |
| 33 | polyA | (A)₅₀₀₀ |
| | | This sequence may encompass 100-5000 adenines. |
| 34 | polyA | (A)₄₀₀ |
| | | This sequence may encompass 100-400 adenines. |
| 35 | polyA | (A)₂₀₀₀ |
| | | This sequence may encompass 50-2000 adenines. |
| 22 | PD1 CAR (aa) | pgwfldspdrpwnpptfspallvvtegdnatftcsfsntsesfylnwyrmspsnqtdklaafpedrsqpgqdc |
| | (PD1 ECD | rfrvtqlpngrdfhmsvvrarrndsgtylcgaislapkaqikeslraelryterraevptahpspsprpagqfqtlv |
| | underlined) | tapaprpptpaptiasqplslrpeacrpaaggavhtrgldfacdiyiwaplagtcgvlllslvitlyckrgrkkllyi |
| | | fkqpfmrpvqttqeedgcscrfpeeeeggcelrvkfsrsadapaykqgqnqlynelnlgrreeydvldkrrgr |
| | | dpemggkprrknpqeglynelqkdkmaeayseigmkgeragkghdglyqglstatkdtydalhmqalppr |
| 23 | PD-1 CAR (na) | atggccctccctgtcactgccctgcttctccccctcgcactcctgctccacgccgctagaccacccggatggtttct |
| | (PD1 ECD | ggactctccggatcgcccgtggaatcccccaaccttctcaccggcactcttggttgtgactgagggcgataatgcg |
| | underlined) | accttcacgtgctcgttctccaacacctccgaatcattcgtgctgaactggtaccgcatgagcccgtcaaaccagac |
| | | cgacaagctcgccgcgtttccggaagatcggtcgcaaccgggacaggattgtcggttccgcgtgactcaactgc |
| | | cgaatggcagagacttccacatgagcgtggtccgcgctaggcgaaacgactccgggacctacctgtgcggagc |
| | | catctcgctggcgcctaaggcccaaatcaaagagagcttgagggccgaactgagagtgaccgagcgcagagct |
| | | gaggtgccaactgcacatccatccccatcgcctcggcctgcggggcagtttcagaccctggtcacgaccactccg |
| | | gcgccgcgcccaccgactccggccccaactatcgcgagccagcccctgtcgctgaggccggaagcatgccgc |
| | | cctgccgccggaggtgctgtgcatacccggggattggacttcgcatgcgacatctacatttgggctcctctcgccg |
| | | gaacttgtggcgtgctccttctgtccctggtcatcaccctgtactgcaagcggggtcggaaaaagcttctgtacatttt |
| | | caagcagcccttcatgaggcccgtgcaaaccacccaggaggaggacggttgctcctgccggttccccgaagag |
| | | gaagaaggaggttgcgagctgcgcgtgaagttctcccggagcgccgacgcccccgcctataagcagggccag |
| | | aaccagctgtacaacgaactgaacctgggacggcgggaagagtacgatgtgctggacaagcggcgcggccgg |
| | | gaccccgaaatgggcgggaagcctagaagaaagaaccctcaggaaggcctgtataacgagctgcagaaggac |
| | | aagatggccgaggcctactccgaaattgggatgaagggagagcggcggaggggaaaggggcacgacggcct |
| | | gtaccaaggactgtccaccgccaccaaggacacatacgatgccctgcacatgcaggcccttccccctcgc |
| 24 | PD-1 CAR (aa) | Malpvtalllplalllhaarppgwfldspdrpwnpptfspallvvtegdnatftcsfsntsesfylnwyrmspsn |
| | with signal | qtdklaafpedrsqpgqdcrfrvtqlpngrdfhmsvvrarrndsgtylcgaislapkaqikeslraelrvterrae |
| | (PD1 ECD | vptahpspsprpagqfqtlvtttpaprpptpaptiasqplslrpeacrpaaggavhtrgldfacdiyiwaplagtc |
| | underlined) | gvlllslvitlyckrgrkkllyifkqpfmrpvqttqeedgcscrfpeeeeggcelrvkfsrsadapaykqgqnql |
| | | ynelnlgrreeydvldkrrgrdpemggkprrknpqeglynelqkdkmaeayseigmkgerrrgkghdgly |
| | | qglstatkdtydalhmqalppr |

[0336] In one aspect, an exemplary CAR constructs comprise an optional leader sequence (e.g., a leader sequence described herein), an extracellular antigen binding domain (e.g., an antigen binding domain described herein), a hinge (e.g., a hinge region described herein), a transmembrane domain (e.g., a transmembrane domain described herein), and an intracellular stimulatory domain (e.g., an intracellular stimulatory domain decribed herein). In one aspect, an exemplary CAR construct comprises an optional leader sequence (e.g., a leader sequence described herein), an extracellular antigen binding domain (e.g., an antigen binding domain described herein), a hinge (e.g., a hinge region described herein), a transmembrane domain (e.g., a transmembrane domain described herein), an intracellular costimulatory signaling domain (e.g., a costimulatory signaling domain described herein) and/or an intracellular primary signaling domain (e.g., a primary signaling domain described herein).

[0337] In one aspect, the CARs (e.g., CD19 CARs) of the invention comprise at least one intracellular signaling domain selected from the group of a CD137 (4-1BB) signaling domain, a CD28 signaling domain, a CD27 signaling domain, an ICOS signaling domain, a CD3zeta signal domain, and any combination thereof. In one aspect, the CARs of the invention comprise at least one intracellular signaling domain is from one or more costimulatory molecule(s) selected from CD137 (4-1BB), CD28, CD27, or ICOS.

[0338] Exemplary CD19 CARs include CD19 CARs described herein, e.g., in one or more tables described herein, or an anti-CD19 CAR described in Xu et al. Blood 123.24(2014):3750-9; Kochenderfer et al. Blood 122.25(2013):4129-39, Cruz et al. Blood 122.17(2013):2965-73, NCT00586391, NCT01087294, NCT02456350, NCT00840853, NCT02659943, NCT02650999, NCT02640209, NCT01747486, NCT02546739, NCT02656147, NCT02772198, NCT00709033, NCT02081937, NCT00924326, NCT02735083, NCT02794246, NCT02746952, NCT01593696, NCT02134262, NCT01853631, NCT02443831, NCT02277522, NCT02348216, NCT02614066, NCT02030834, NCT02624258, NCT02625480, NCT02030847, NCT02644655, NCT02349698, NCT02813837, NCT02050347, NCT01683279, NCT02529813, NCT02537977, NCT02799550, NCT02672501, NCT02819583, NCT02028455, NCT01840566, NCT01318317, NCT01864889, NCT02706405, NCT01475058, NCT01430390, NCT02146924, NCT02051257, NCT02431988, NCT01815749, NCT02153580, NCT01865617, NCT02208362, NCT02685670, NCT02535364, NCT02631044, NCT02728882, NCT02735291, NCT01860937, NCT02822326, NCT02737085, NCT02465983, NCT02132624, NCT02782351, NCT01493453, NCT02652910, NCT02247609, NCT01029366, NCT01626495, NCT02721407, NCT01044069, NCT00422383, NCT01680991, NCT02794961, or NCT02456207, each of which is incorporated herein by reference in its entirety.

### Antigen Binding Domain

[0339] In one aspect, the CAR of the disclosure comprises a target-specific binding element otherwise referred to as an antigen binding domain. In one embodiment, the portion of the CAR comprising the antigen binding domain comprises an antigen binding domain that targets, e.g., specifically binds to, an antigen, e.g., antigen described herein, e.g., CD19. In one embodiment, the antigen binding domain targets, e.g., specifically binds to, human CD19.

[0340] The antigen binding domain can be any domain that binds to the antigen including but not limited to a monoclonal antibody, a polyclonal antibody, a recombinant antibody, a human antibody, a humanized antibody, and a functional fragment thereof, including but not limited to a single-domain antibody such as a heavy chain variable domain (VH), a light chain variable domain (VL) and a variable domain (VHH) of camelid derived nanobody, and to an alternative scaffold known in the art to function as an antigen binding domain, such as a recombinant fibronectin domain, and the like. In some instances, it is beneficial for the antigen binding domain to be derived from the same species in which the CAR will ultimately be used in. For example, for use in humans, it may be beneficial for the antigen binding domain of the CAR to comprise human or humanized residues for the antigen binding domain of an antibody or antibody fragment. Thus, in one aspect, the antigen binding domain comprises a human antibody or an antibody fragment.

[0341] In one embodiment, the antigen binding domain comprises one, two three (e.g., all three) heavy chain CDRs, HC CDR1, HC CDR2 and HC CDR3, from an antibody described herein (e.g., an antibody described in WO2015/142675, US-2015-0283178-A1, US-2016-0046724-A1, US2014/0322212A1, US2016/0068601A1, US2016/0051651A1, US2016/0096892A1, US2014/0322275A1, or WO2015/090230, incorporated herein by reference), and/or one, two, three (e.g., all three) light chain CDRs, LC CDR1, LC CDR2 and LC CDR3, from an antibody described herein (e.g., an antibody described in WO2015/142675, US-2015-0283178-A1, US-2016-0046724-A1, US2014/0322212A1, US2016/0068601A1, US2016/0051651A1, US2016/0096892A1, US2014/0322275A1, or WO2015/090230, incorporated herein by reference). In one embodiment, the antigen binding domain comprises a heavy chain variable region and/or a variable light chain region of an antibody listed above.

[0342] In embodiments, the antigen binding domain is an antigen binding domain described in WO2015/142675, US-2015-0283178-A1, US-2016-0046724-A1, US2014/0322212A1, US2016/0068601A1, US2016/0051651A1, US2016/0096892A1, US2014/0322275A1, or WO2015/090230, incorporated herein by reference.

[0343] In embodiments, the antigen binding domain targets BCMA and is described in US-2016-0046724-A1.

[0344] In embodiments, the antigen binding domain targets CD19 and is described in US-2015-0283178-A1.

[0345] In embodiments, the antigen binding domain targets CD123 and is described in US2014/0322212A1, US2016/0068601A1.

[0346] In embodiments, the antigen binding domain targets CLL and is described in US2016/0051651A1.

[0347] In embodiments, the antigen binding domain targets CD33 and is described in US2016/0096892A1.

[0348] Exemplary target antigens that can be targeted using the CAR-expressing cells, include, but are not limited to, CD19, CD123, EGFRvIII, CD33, mesothelin, BCMA, and GFR ALPHA-4, among others, as described in, for example, WO2014/153270, WO 2014/130635, WO2016/028896, WO 2014/130657, WO2016/014576, WO 2015/090230, WO2016/014565, WO2016/014535, and WO2016/025880, each of which is herein incorporated by reference in its entirety.

[0349] In other embodiments, the CAR-expressing cells can specifically bind to humanized CD19, e.g., can include a CAR molecule, or an antigen binding domain (e.g., a humanized antigen binding domain) according to Table 3 of WO2014/153270, incorporated herein by reference. The amino acid and nucleotide sequences encoding the CD19 CAR molecules and antigen binding domains (e.g., including one, two, three VH CDRs; and one, two, three VL CDRs according to Kabat or Chothia), are specified in WO2014/153270.

[0350] In other embodiments, the CAR-expressing cells can specifically bind to CD123, e.g., can include a CAR molecule (e.g., any of the CAR1 to CAR8), or an antigen binding domain according to Tables 1-2 of WO 2014/130635, incorporated herein by reference. The amino acid and nucleotide sequences encoding the CD123 CAR molecules and antigen binding domains (e.g., including one, two, three VH CDRs; and one, two, three VL CDRs according to Kabat or Chothia), are specified in WO 2014/130635.

[0351] In other embodiments, the CAR-expressing cells can specifically bind to CD123, e.g., can include a CAR molecule (e.g., any of the CAR123-1 ro CAR123-4 and hzCAR123-1 to hzCAR123-32), or an antigen binding domain according to Tables 2, 6, and 9 of WO2016/028896, incorporated herein by reference. The amino acid and nucleotide sequences encoding the CD123 CAR molecules and antigen binding domains (e.g., including one, two, three VH CDRs; and one, two, three VL CDRs according to Kabat or Chothia), are specified in WO2016/028896.

[0352] In other embodiments, the CAR-expressing cells can specifically bind to EGFRvIII, e.g., can include a CAR molecule, or an antigen binding domain according to Table 2 or SEQ ID NO:11 of WO 2014/130657, incorporated herein by reference. The amino acid and nucleotide sequences encoding the EGFRvIII CAR molecules and antigen binding domains (e.g., including one, two, three VH CDRs; and one, two, three VL CDRs according to Kabat or Chothia), are specified in WO 2014/130657.

[0353] In other embodiments, the CAR-expressing cells can specifically bind to CD33, e.g., can include a CAR molecule (e.g., any of CAR33-1 to CAR-33-9), or an antigen binding domain according to Table 2 or 9 of WO2016/014576, incorporated herein by reference. The amino acid and nucleotide sequences encoding the CD33 CAR molecules and antigen binding domains (e.g., including one, two, three VH CDRs; and one, two, three VL CDRs according to Kabat or Chothia), are specified in WO2016/014576.

[0354] In other embodiments, the CAR-expressing cells can specifically bind to mesothelin, e.g., can include a CAR molecule, or an antigen binding domain according to Tables 2-3 of WO 2015/090230, incorporated herein by reference. The amino acid and nucleotide sequences encoding the mesothelin CAR molecules and antigen binding domains (e.g., including one, two, three VH CDRs; and one, two, three VL CDRs according to Kabat or Chothia), are specified in WO 2015/090230.

[0355] In other embodiments, the CAR-expressing cells can specifically bind to BCMA, e.g., can include a CAR molecule, or an antigen binding domain according to Table 1 or 16, SEQ ID NO: 271 or SEQ ID NO: 273 of WO2016/014565, incorporated herein by reference. The amino acid and nucleotide sequences encoding the BCMA CAR molecules and antigen binding domains (e.g., including one, two, three VH CDRs; and one, two, three VL CDRs according to Kabat or Chothia), are specified in WO2016/014565.

[0356] In other embodiments, the CAR-expressing cells can specifically bind to CLL-1, e.g., can include a CAR molecule, or an antigen binding domain according to Table 2 of WO2016/014535, incorporated herein by reference. The amino acid and nucleotide sequences encoding the CLL-1 CAR molecules and antigen binding domains (e.g., including one, two, three VH CDRs; and one, two, three VL CDRs according to Kabat or Chothia), are specified in WO2016/014535.

[0357] In other embodiments, the CAR-expressing cells can specifically bind to GFR ALPHA-4, e.g., can include a CAR molecule, or an antigen binding domain according to Table 2 of WO2016/025880, incorporated herein by reference. The amino acid and nucleotide sequences encoding the GFR ALPHA-4 CAR molecules and antigen binding domains (e.g., including one, two, three VH CDRs; and one, two, three VL CDRs according to Kabat or Chothia), are specified in WO2016/025880.

[0358] In one embodiment, the antigen binding domain of any of the CAR molecules described herein (e.g., any of CD19, CD123, EGFRvIII, CD33, mesothelin, BCMA, and GFR ALPHA-4) comprises one, two three (e.g., all three) heavy chain CDRs, HC CDR1, HC CDR2 and HC CDR3, from an antibody listed above, and/or one, two, three (e.g., all three) light chain CDRs, LC CDR1, LC CDR2 and LC CDR3, from an antigen binding domain listed above. In one embodiment, the antigen binding domain comprises a heavy chain variable region and/or a variable light chain region of an antibody listed or described above.

[0359] In one embodiment, the CD19 binding domain comprises one or more (e.g., all three) light chain complementary determining region 1 (LC CDR1), light chain complementary determining region 2 (LC CDR2), and light chain complementary determining region 3 (LC CDR3) of a CD19 binding domain selected from SEQ ID NOS: 45-56, 69-80, 106, 109, 110, 112, or 115 and one or more (e.g., all three) heavy chain complementary determining region 1 (HC CDR1), heavy chain complementary determining region 2 (HC CDR2), and heavy chain complementary determining region 3 (HC CDR3) of a CD19 binding domain selected from SEQ ID NOS: 45-56, 69-80, 106, 109, 110, 112, or 115. In one embodiment, the CD19 binding domain comprises a light chain variable region described herein (e.g., in Table 2 or 3) and/or a heavy chain variable region described herein (e.g., in Table 2 or 3). In one embodiment, the CD19 binding domain is a scFv comprising a light chain variable region and a heavy chain variable region of an amino acid sequence of Table 2 or 3. In an embodiment, the CD19 binding domain (e.g., an scFV) comprises: a light chain variable region comprising an amino acid sequence having at least one, two or three modifications (e.g., substitutions) but not more than 30, 20 or 10 modifications (e.g., substitutions) of an amino acid sequence of a light chain variable region provided in Table 2 or 3, or a sequence with 95-99% identity to an amino acid sequence of Table 2 or 3; and/or a heavy chain variable region comprising an amino acid sequence having at least one, two or three modifications (e.g., substitutions) but not more than 30, 20 or 10 modifications (e.g., substitutions) of an amino acid sequence of a heavy chain variable region provided in Table 2 or 3, or a sequence with 95-99% identity to an amino acid sequence of Table 2 or 3.

[0360] In one embodiment, the CD19 binding domain comprises a light chain variable region comprising an amino acid sequence described herein, e.g., in Table 2 or 3, is attached to a heavy chain variable region comprising an amino acid sequence described herein, e.g., in Table 2 or 3, via a linker, e.g., a linker described herein. In one embodiment, the humanized anti-CD19 binding domain includes a (Gly4-Ser)n linker (SEQ ID NO: 26), wherein n is 1, 2, 3, 4, 5, or 6, preferably 3 or 4. The light chain variable region and heavy chain variable region of a scFv can be, e.g., in any of the following orientations: light chain variable region-linker-heavy chain variable region or heavy chain variable region-linker-light chain variable region.

[0361] In another embodiment, the CD19 binding domain comprises any antibody or antibody fragment thereof known in the art that binds to CD19.

[0362] In one aspect, the antibodies of the invention may exist in a variety of other forms including, for example, Fab, Fab′, F(ab′)₂, Fv fragments, scFv antibody fragments, disulfide-linked Fvs (sdFv), a Fd fragment consisting of the VH and CH1 domains, linear antibodies, single domain antibodies such as sdAb (either VL or VH), camelid VHH domains, multi-specific antibodies formed from antibody fragments such as a bivalent fragment comprising two Fab fragments linked by a disulfide brudge at the hinge region, and an isolated CDR or other epitope binding fragments of an antibody. In one aspect, the antibody fragment provided herein is a scFv. In some instances, a human scFv may also be derived from a yeast display library.

[0363] A humanized antibody can be produced using a variety of techniques known in the art, including but not limited to, CDR-grafting (see, e.g., European Patent No. EP 239,400; International Publication No. WO 91/09967; and U.S. Pat. Nos. 5,225,539, 5,530,101, and 5,585,089, each of which is incorporated herein in its entirety by reference), veneering or resurfacing (see, e.g., European Patent Nos. EP 592,106 and EP 519,596; Padlan, 1991, Molecular Immunology, 28(4/5):489-498; Studnicka et al., 1994, Protein Engineering, 7(6):805-814; and Roguska et al., 1994, PNAS, 91:969-973, each of which is incorporated herein by its entirety by reference), chain shuffling (see, e.g., U.S. Pat. No. 5,565,332, which is incorporated herein in its entirety by reference), and techniques disclosed in, e.g., U.S. Patent Application Publication No. US2005/0042664, U.S. Patent Application Publication No. US2005/0048617, U.S. Pat. No. 6,407,213, U.S. Pat. No. 5,766,886, International Publication No. WO 9317105, Tan et al., J. Immunol., 169:1119-25 (2002), Caldas et al., Protein Eng., 13(5):353-60 (2000), Morea et al., Methods, 20(3):267-79 (2000), Baca et al., J. Biol. Chem., 272(16):10678-84 (1997), Roguska et al., Protein Eng., 9(10):895-904 (1996), Couto et al., Cancer Res., 55 (23 Supp):5973s-5977s (1995), Couto et al., Cancer Res., 55(8):1717-22 (1995), Sandhu J S, Gene, 150(2):409-10 (1994), and Pedersen et al., J. Mol. Biol., 235(3):959-73 (1994), each of which is incorporated herein in its entirety by reference. Additional information on framework regions and humanized antibodies is described on pages 169-170 of International Application WO 2016/164731, filed Apr. 8, 2016, which is incorporated by reference in its entirety.

[0364] The choice of human variable domains, both light and heavy, to be used in making the humanized antibodies is to reduce antigenicity. According to the so-called “best-fit” method, the sequence of the variable domain of a rodent antibody is screened against the entire library of known human variable-domain sequences. The human sequence which is closest to that of the rodent is then accepted as the human framework (FR) for the humanized antibody (Sims et al., J. Immunol., 151:2296 (1993); Chothia et al., J. Mol. Biol., 196:901 (1987), the contents of which are incorporated herein by reference herein in their entirety). Another method uses a particular framework derived from the consensus sequence of all human antibodies of a particular subgroup of light or heavy chains. The same framework may be used for several different humanized antibodies (see, e.g., Nicholson et al. Mol. Immun. 34 (16-17): 1157-1165 (1997); Carter et al., Proc. Natl. Acad. Sci. USA, 89:4285 (1992); Presta et al., J. Immunol., 151:2623 (1993), the contents of which are incorporated herein by reference herein in their entirety). In some embodiments, the framework region, e.g., all four framework regions, of the heavy chain variable region are derived from a VH4_4-59 germline sequence. In one embodiment, the framework region can comprise, one, two, three, four or five modifications, e.g., substitutions, e.g., from the amino acid at the corresponding murine sequence (e.g., of SEQ ID NO: 109). In one embodiment, the framework region, e.g., all four framework regions of the light chain variable region are derived from a VK3_1.25 germline sequence. In one embodiment, the framework region can comprise, one, two, three, four or five modifications, e.g., substitutions, e.g., from the amino acid at the corresponding murine sequence (e.g., of SEQ ID NO: 109). Design of humanized antibodies or antibody fragments based on three-dimensional conformational structure is described in detail on page 171 of International Application WO 2016/164731, filed Apr. 8, 2016, which is incorporated by reference in its entirety.

[0365] A humanized antibody or antibody fragment may retain a similar antigenic specificity as the original antibody, e.g., in the present disclosure, the ability to bind human CD19. In some embodiments, a humanized antibody or antibody fragment may have improved affinity and/or specificity of binding to human CD19.

[0366] In one aspect, the binding domain (e.g., an antigen-binding domain that binds CD19) is a fragment, e.g., a single chain variable fragment (scFv). In one aspect, the binding domain is a Fv, a Fab, a (Fab′)2, or a bi-functional (e.g. bi-specific) hybrid antibody (e.g., Lanzavecchia et al., Eur. J. Immunol. 17, 105 (1987)). In one aspect, the antibodies and fragments thereof of the invention binds a CD19 protein with wild-type or enhanced affinity.

[0367] In some instances, scFvs can be prepared according to method known in the art (see, for example, Bird et al., (1988) Science 242:423-426 and Huston et al., (1988) Proc. Natl. Acad. Sci. USA 85:5879-5883). ScFv molecules can be produced by linking VH and VL regions together using flexible polypeptide linkers. The scFv molecules comprise a linker (e.g., a Ser-Gly linker) with an optimized length and/or amino acid composition. The linker length can greatly affect how the variable regions of a scFv fold and interact. In fact, if a short polypeptide linker is employed (e.g., between 5-10 amino acids) intrachain folding is prevented. Interchain folding is also required to bring the two variable regions together to form a functional epitope binding site. For examples of linker orientation and size see, e.g., Hollinger et al. 1993 Proc Natl Acad. Sci. U.S.A. 90:6444-6448, U.S. Patent Application Publication Nos. 2005/0100543, 2005/0175606, 2007/0014794, and PCT publication Nos. WO2006/020258 and WO2007/024715, is incorporated herein by reference.

[0368] An scFv can comprise a linker of at least 1, 2, 3, 4, 5, 6, 7, 8, 9, 10, 11, 12, 13, 14, 15, 16, 17, 18, 19, 20, 25, 30, 35, 40, 45, 50, or more amino acid residues between its VL and VH regions. The linker sequence may comprise any naturally occurring amino acid. In some embodiments, the linker sequence comprises amino acids glycine and serine. In another embodiment, the linker sequence comprises sets of glycine and serine repeats such as (Gly₄Ser)n, where n is a positive integer equal to or greater than 1 (SEQ ID NO:25). In one embodiment, the linker can be (Gly₄Ser)₄ (SEQ ID NO:27) or (Gly₄Ser)₃(SEQ ID NO:28). Variation in the linker length may retain or enhance activity, giving rise to superior efficacy in activity studies.

[0369] In some embodiments, the amino acid sequence of the antigen binding domain (e.g., an antigen-binding domain that binds CD19) or other portions or the entire CAR can be modified, e.g., an amino acid sequence described herein can be modified, e.g., by a conservative substitution. Families of amino acid residues having similar side chains have been defined in the art, including basic side chains (e.g., lysine, arginine, histidine), acidic side chains (e.g., aspartic acid, glutamic acid), uncharged polar side chains (e.g., glycine, asparagine, glutamine, serine, threonine, tyrosine, cysteine), nonpolar side chains (e.g., alanine, valine, leucine, isoleucine, proline, phenylalanine, methionine, tryptophan), beta-branched side chains (e.g., threonine, valine, isoleucine) and aromatic side chains (e.g., tyrosine, phenylalanine, tryptophan, histidine).

[0370] Percent identity in the context of two or more nucleic acids or polypeptide sequences, refers to two or more sequences that are the same. Two sequences are “substantially identical” if two sequences have a specified percentage of amino acid residues or nucleotides that are the same (e.g., 60% identity, optionally 70%, 71%. 72%. 73%, 74%, 75%, 76%, 77%, 78%, 79%, 80%,81%, 82%, 83%, 84%, 85%, 86%, 87%, 88%, 89%, 90%, 91%, 92%, 93%, 94%, 95%, 96%, 97%, 98%, 99% identity over a specified region, or, when not specified, over the entire sequence), when compared and aligned for maximum correspondence over a comparison window, or designated region as measured using one of the following sequence comparison algorithms or by manual alignment and visual inspection. Optionally, the identity exists over a region that is at least about 50 nucleotides (or 10 amino acids) in length, or over a region that is 100 to 500 or 1000 or more nucleotides (or 20, 50, 200 or more amino acids) in length.

[0371] For sequence comparison, typically one sequence acts as a reference sequence, to which test sequences are compared. When using a sequence comparison algorithm, test and reference sequences are entered into a computer, subsequence coordinates are designated, if necessary, and sequence algorithm program parameters are designated. Default program parameters can be used, or alternative parameters can be designated. The sequence comparison algorithm then calculates the percent sequence identities for the test sequences relative to the reference sequence, based on the program parameters. Methods of alignment of sequences for comparison are well known in the art. Optimal alignment of sequences for comparison can be conducted, e.g., by the local homology algorithm of Smith and Waterman, (1970) Adv. Appl. Math. 2:482c, by the homology alignment algorithm of Needleman and Wunsch, (1970) J. Mol. Biol. 48:443, by the search for similarity method of Pearson and Lipman, (1988) Proc. Nat'l. Acad. Sci. USA 85:2444, by computerized implementations of these algorithms (GAP, BESTFIT, FASTA, and TFASTA in the Wisconsin Genetics Software Package, Genetics Computer Group, 575 Science Dr., Madison, Wis.), or by manual alignment and visual inspection (see, e.g., Brent et al., (2003) Current Protocols in Molecular Biology).

[0372] Two examples of algorithms that are suitable for determining percent sequence identity and sequence similarity are the BLAST and BLAST 2.0 algorithms, which are described in Altschul et al., (1977) Nuc. Acids Res. 25:3389-3402; and Altschul et al., (1990) J. Mol. Biol. 215:403-410, respectively. Software for performing BLAST analyses is publicly available through the National Center for Biotechnology Information.

[0373] The percent identity between two amino acid sequences can also be determined using the algorithm of E. Meyers and W. Miller, (1988) Comput. Appl. Biosci. 4:11-17) which has been incorporated into the ALIGN program (version 2.0), using a PAM120 weight residue table, a gap length penalty of 12 and a gap penalty of 4. In addition, the percent identity between two amino acid sequences can be determined using the Needleman and Wunsch (1970) J. Mol. Biol. 48:444-453) algorithm which has been incorporated into the GAP program in the GCG software package (available at www.gcg.com), using either a Blossom 62 matrix or a PAM250 matrix, and a gap weight of 16, 14, 12, 10, 8, 6, or 4 and a length weight of 1, 2, 3, 4, 5, or 6.

[0374] In one aspect, the present disclosure contemplates modifications of the starting antibody or fragment (e.g., scFv) amino acid sequence that generate functionally equivalent molecules. For example, the VH or VL of a binding domain (e.g., an antigen-binding domain that binds CD19), e.g., scFv, comprised in the CAR can be modified to retain at least about 70%, 71%. 72%. 73%, 74%, 75%, 76%, 77%, 78%, 79%, 80%,81%, 82%, 83%, 84%, 85%, 86%, 87%, 88%, 89%, 90%, 91%, 92%, 93%, 94%, 95%, 96%, 97%, 98%, 99% identity of the starting VH or VL framework region of an anti-CD19 binding domain, e.g., scFv. The present invention contemplates modifications of the entire CAR construct, e.g., modifications in one or more amino acid sequences of the various domains of the CAR construct in order to generate functionally equivalent molecules. The CAR construct can be modified to retain at least about 70%, 71%. 72%. 73%, 74%, 75%, 76%, 77%, 78%, 79%, 80%, 81%, 82%, 83%, 84%, 85%, 86%, 87%, 88%, 89%, 90%, 91%, 92%, 93%, 94%, 95%, 96%, 97%, 98%, 99% identity of the starting CAR construct.

[0375] In some instances, scFvs can be prepared according to method known in the art (see, for example, Bird et al., (1988) Science 242:423-426 and Huston et al., (1988) Proc. Natl. Acad. Sci. USA 85:5879-5883). ScFv molecules can be produced by linking VH and VL regions together, e.g., using flexible polypeptide linkers. The scFv molecules can comprise a linker (e.g., a Ser-Gly linker) with an optimized length and/or amino acid composition. The linker length can greatly affect how the variable regions of an scFv fold and interact. In fact, if a short polypeptide linker is employed (e.g., between 5-10 amino acids, intrachain folding is prevented. Interchain folding is also required to bring the two variable regions together to form a functional epitope binding site. For examples of linker orientation and size see, e.g., Hollinger et al. 1993 Proc Natl Acad. Sci. U.S.A. 90:6444-6448, U.S. Patent Application Publication Nos. 2005/0100543, 2005/0175606, 2007/0014794, and PCT publication Nos. WO2006/020258 and WO2007/024715, is incorporated herein by reference.

### Exemplary CD19 Antigen Binding Domains and CAR Constructs

[0376] Exemplary CD19 CAR constructs disclosed herein comprise a scFv (e.g., a human scFv) as disclosed in Table 2 or 3 herein, optionally preceded with an optional leader sequence (e.g., SEQ ID NO:1 and SEQ ID NO:12 for exemplary leader amino acid and nucleotide sequences, respectively). The sequences of the scFv fragments (amino acid sequences of SEQ ID NOs: 45-56, 69-80, 106, 109, 110, 112, or 115) are provided herein in Table 2 or 3. The CD19 CAR construct can further include an optional hinge domain, e.g., a CD8 hinge domain (e.g., including the amino acid sequence of SEQ ID NO: 2 or encoded by a nucleic acid sequence of SEQ ID NO:13); a transmembrane domain, e.g., a CD8 transmembrane domain (e.g., including the amino acid sequence of SEQ ID NO: 6 or encoded by the nucleotide sequence of SEQ ID NO: 17); an intracellular domain, e.g., a 4-1BB intracellular domain (e.g., including the amino acid sequence of SEQ ID NO: 7 or encoded by the nucleotide sequence of SEQ ID NO: 18; and a functional signaling domain, e.g., a CD3 zeta domain (e.g., including amino acid sequence of SEQ ID NO: 9 or 10, or encoded by the nucleotide sequence of SEQ ID NO: 20 or 21). In certain embodiments, the domains are contiguous with and in the same reading frame to form a single fusion protein. In other embodiments, the domain are in separate polypeptides, e.g., as in an RCAR molecule as described herein.

[0377] In certain embodiments, the full length CD19 CAR molecule includes the amino acid sequence of, or is encoded by the nucleotide sequence of, CAR1-CAR12, CTL019, mCAR1-mCAR3, or SSJ25-C1, provided in Table 2 or 3, or a sequence substantially identical (e.g., 95-99% identical thereto, or up to 20, 15, 10, 8, 6, 5, 4, 3, 2, or 1 amino acid changes) to any of the aforesaid sequences.

[0378] In certain embodiments, the CD19 CAR molecule, or the CD19 antigen binding domain, includes the scFv amino acid sequence of, or is encoded by the nucleotide sequence of, CAR1-CAR12, CTL019, mCAR1-mCAR3, or SSJ25-C1 , provided in Table 2 or 3, or a sequence substantially identical (e.g., 95-99% identical thereto, or up to 20, 15, 10, 8, 6, 5, 4, 3, 2, or 1 amino acid changes) to any of the aforesaid sequences.

[0379] In certain embodiments, the CD19 CAR molecule, or the CD19 antigen binding domain, includes the heavy chain variable region and/or the light chain variable region of CAR1-CAR12, CTL019, mCAR1-mCAR3, or SSJ25-C1 , provided in Table 2 or 3, or a sequence substantially identical (e.g., 95-99% identical, or up to 20, 15, 10, 8, 6, 5, 4, 3, 2, or 1 amino acid changes) to any of the aforesaid sequences.

[0380] In certain embodiments, the CD19 CAR molecule, or the CD19 antigen binding domain, includes one, two or three CDRs from the heavy chain variable region (e.g., HCDR1, HCDR2 and/or HCDR3) of CAR1-CAR12, CTL019, mCAR1-mCAR3, or SSJ25-C1,provided in Table 2 or 3; and/or one, two or three CDRs from the light chain variable region (e.g., LCDR1, LCDR2 and/or LCDR3) of CAR1-CAR12, CTL019, mCAR1-mCAR3, or SSJ25-C1, provided in Table 2 or 3; or a sequence substantially identical (e.g., 95-99% identical, or up to 5, 4, 3, 2, or 1 amino acid changes) to any of the aforesaid sequences.

[0381] The sequences of CDR sequences of the scFv domains are shown in Table 4 for the heavy chain variable domains and in Table 5 for the light chain variable domains.

[0382] The amino acid and nucleic acid sequences of the CD19 scFv domains and CD19 CAR molecules are provided in Tables 2 and 3. In one embodiment, the CD19 CAR molecule includes a leader sequence described herein, e.g., as underlined in the sequences provided in Tables 2 and 3. In one embodiment, the CD19 CAR molecule does not include a leader sequence.

[0383] In embodiments, the CAR molecule comprises an antigen binding domain that binds specifically to CD19 (CD19 CAR). In one embodiment, the antigen binding domain targets human CD19. In one embodiment, the antigen binding domain of the CAR has the same or a similar binding specificity as the FMC63 scFv fragment described in Nicholson et al. Mol. Immun. 34 (16-17): 1157-1165 (1997). In one embodiment, the antigen binding domain of the CAR includes the scFv fragment described in Nicholson et al. Mol. Immun. 34 (16-17): 1157-1165 (1997). A CD19 antibody molecule can be, e.g., an antibody molecule (e.g., a humanized anti-CD19 antibody molecule) described in WO2014/153270, which is incorporated herein by reference in its entirety. WO2014/153270 also describes methods of assaying the binding and efficacy of various CAR constructs.

[0384] In one aspect, the parental murine scFv sequence is the CAR19 construct provided in PCT publication WO2012/079000 (incorporated herein by reference) and provided herein as SEQ ID NO: 108. In one embodiment, the anti-CD19 binding domain is a scFv described in WO2012/079000 and provided herein in SEQ ID NO: 109.

[0385] In one embodiment, the CAR molecule comprises the polypeptide sequence provided as SEQ ID NO: 12 in PCT publication WO2012/079000, and provided herein as SEQ ID NO: 108, wherein the scFv domain is substituted by one or more sequences selected from SEQ ID NOS: 93-104. In one embodiment, the scFv domains of SEQ ID NOS: 93-104 are humanized variants of the scFv domain of SEQ ID NO: 109 which is an scFv fragment of murine origin that specifically binds to human CD19. Humanization of this mouse scFv may be desired for the clinical setting, where the mouse-specific residues may induce a human-anti-mouse antigen (HAMA) response in patients who receive CART19 treatment, e.g., treatment with T cells transduced with the CAR19 construct.

[0386] In one embodiment, the CD19 CAR comprises an amino acid sequence provided as SEQ ID NO: 12 in PCT publication WO2012/079000. In embodiment, the amino acid sequence is

[0387] MALPVTALLLPLALLLHAARPdiqmtqttsslsaslgdrvtiscrasqdiskylnwyqqkpdgtvklliyhtsr lhsgvpsrfsgsgsgtdysltisnleqediatyfcqqgntlpytfgggtkleitggggsggggsggggsevklqesgpglvapsqslsvtct vsgvslpdygvswirqpprkglewlgviwgsettyynsalksrltiikdnsksqvflkmnslqtddtaiyycakhyyyggsyamdyw gqgtsvtvsstttpaprpptpaptiasqplslrpeacrpaaggavhtrgldfacdiyiwaplagtcgvlllslvitlyckrgrkkllyifkqpf mrpvqttqeedgcscrfpeeeeggcelrvkfsrsadapaykqgqnqlynelnlgrreeydvldkrrgrdpemggkprrknpqeglyn elqkdkmaeayseigmkgerrrgkghdglyqglstatkdtydalhmqalppr (SEQ ID NO: 108), or a sequence substantially homologous thereto.

[0388] In one embodiment, the amino acid sequence is:

[0389] diqmtqttsslsaslgdrvtiscrasqdiskylnwyqqkpdgtvklliyhtsrlhsgvpsrfsgsgsgtdysltisnleqediatyf cqqgntlpytfgggtkleitggggsggggsggggsevklqesgpglvapsqslsvtctvsgvslpdygvswirqpprkglewlgviwg settyynsalksrltiikdnsksqvflkmnslqtddtaiyycakhyyyggsyamdywgqgtsvtvsstttpaprpptpaptiasqplslrp eacrpaaggavhtrgldfacdiyiwaplagtcgvlllslvitlyckrgrkkllyifkqpfmrpvqttqeedgcscrfpeeeeggcelrvkfs rsadapaykqgqnqlynelnlgrreeydvldkrrgrdpemggkprrknpqeglynelqkdkmaeayseigmkgerrrgkghdgly qglstatkdtydalhmqalppr (SEQ ID NO: 289), or a sequence substantially homologous thereto.

[0390] In one embodiment, the CD19 CAR has the USAN designation TISAGENLECLEUCEL-T. In embodiments, CTL019 is made by a gene modification of T cells is mediated by stable insertion via transduction with a self-inactivating, replication deficient Lentiviral (LV) vector containing the CTL019 transgene under the control of the EF-1 alpha promoter. CTL019 can be a mixture of transgene positive and negative T cells that are delivered to the subject on the basis of percent transgene positive T cells.

[0391] In other embodiments, the CD19 CAR comprises an antigen binding domain (e.g., a humanized antigen binding domain) according to Table 3 of WO2014/153270, incorporated herein by reference.

[0392] In embodiments, the CAR molecule is a CD19 CAR molecule described herein, e.g., a humanized CAR molecule described herein, e.g., a humanized CD19 CAR molecule of Table 2 or having CDRs as set out in Tables 4 and 5.

[0393] In embodiments, the CAR molecule is a CD19 CAR molecule described herein, e.g., a murine CAR molecule described herein, e.g., a murine CD19 CAR molecule of Table 3 or having CDRs as set out in Tables 4 and 5.

[0394] In some embodiments, the CAR molecule comprises one, two, and/or three CDRs from the heavy chain variable region and/or one, two, and/or three CDRs from the light chain variable region of the murine or humanized CD19 CAR of Table 4 and 5.

[0395] In one embodiment, the antigen binding domain comprises one, two three (e.g., all three) heavy chain CDRs, HC CDR1, HC CDR2 and HC CDR3, from an antibody listed herein, and/or one, two, three (e.g., all three) light chain CDRs, LC CDR1, LC CDR2 and LC CDR3, from an antibody listed herein. In one embodiment, the antigen binding domain comprises a heavy chain variable region and/or a variable light chain region of an antibody listed herein.

### Humanization of Murine Anti-CD19 Antibody

[0396] Humanization of murine CD19 antibody is desired for the clinical setting, where the mouse-specific residues may induce a human-anti-mouse antigen (HAMA) response in patients who receive CART19 treatment, i.e., treatment with T cells transduced with the CAR19 construct. The production, characterization, and efficacy of humanized CD19 CAR sequences is described in International Application WO2014/153270 which is herein incorporated by reference in its entirety, including Examples 1-5 (p. 115-159), for instance Tables 3, 4, and 5 (p. 125-147).

### CAR Constructs, e.g., CD19 CAR Constructs

[0397] Of the CD19 CAR constructs described in International Application WO2014/153270, certain sequences are reproduced herein.

[0398] The sequences of the humanized scFv fragments (SEQ ID NOS: 45-56) are provided below in Table 2. Full CAR constructs were generated using SEQ ID NOs: 45-56 with additional sequences, e.g., from Table 1, shown below, to generate full CAR constructs with SEQ ID NOs: 93-104.

[0399] These clones all contained a Q/K residue change in the signal domain of the co-stimulatory domain derived from 4-1BB.

TABLE 2
Humanized CD19 CAR Constructs

| | | |
|---|---|---|
| | SEQ | |
| Name | ID NO: | Sequence |

CAR 1

| | | |
|---|---|---|
| CAR1 | 45 | EIVMTQSPATLSLSPGERATLSCRASQDISKYLNWYQQKPGQAPRLL |
| scFv | | IYHTSRLHSGIPARFSGSGSGTDYTLTISSLQPEDFAVYFCQQGNTL |
| domain | | PYTFGQGTKLEIKGGGGSGGGGSGGGGSQVQLQESGPGLVKPSETLS |
| | | LTCTVSGVSLPDYGVSWIRQPPGKGLEWIGVIWGSETTYYSSSLKSR |
| | | VIISKDNSKNQVSLKLSSVTAADTAVYYCAKHYYYGGSYAMDYWGQG |
| | | TLVTVSS |
| 103101 | 57 | atggccctccctgtcaccgccctgctgcttccgctggctcttctgctccacgccgc |
| CAR1 | | tcggcccgaaattgtgatgacccagtcacccgccactcttagcctttcacccggtg |
| Soluble | | agcgcgcaaccctgtcttgcagagcctcccaagacatctcaaaataccttaattgg |
| scFv-nt | | tatcaacagaagcccggacaggctcctcgccttctgatctaccacaccagccggct |
| | | ccattctggaatccctgccaggttcagcggtagcggatctgggaccgactacaccc |
| | | tcactatcagctcactgcagccagaggacttcgctgtctatttctgtcagcaaggg |
| | | aacaccctgccctacacctttggacagggcaccaagctcgagattaaaggtggagg |
| | | tggcagcggaggaggtgggtccggcggtggaggaagccaggtccaactccaagaaa |
| | | gcggaccgggtcttgtgaagccatcagaaactctttcactgacttgtactgtgagc |
| | | ggagtgtctctccccgattacggggtgtcttggatcagacagccaccggggaaggg |
| | | tctggaatggattggagtgatttggggctctgagactacttactactcttcatccc |
| | | tcaagtcacgcgtcaccatctcaaaggacaactctaagaatcaggtgtcactgaaa |
| | | ctgtcatctgtgaccgcagccgacaccgccgtgtactattgcgctaagcattacta |
| | | ttatggcgggagctacgcaatggattactggggacagggtactctggtcaccgtgt |
| | | ccagccaccaccatcatcaccatcaccat |
| 103101 | 69 | MALPVTALLLPLALLLHAARPeivmtqspatlslspgeratlscrasqdiskylnw |
| CAR1 | | yqqkpgqaprlliyhtsrlhsgiparfsgsgsgtdytltisslqpedfavyfcqqg |
| Soluble | | ntlpytfgqgtkleikggggsggggsggggsqvqlqesgpglvkpsetlsltctvs |
| scFv-aa | | gvslpdygvswirqppgkglewigviwgsettyyssslksrvtiskdnsknqvslk |
| | | lssvtaadtavyycakhyyyggsyamdywgqgtlvtvsshhhhhhhh |
| 104875 | 81 | atggccctccctgtcaccgccctgctgcttccgctggctcttctgctccacgccgc |
| CAR 1- | | tcggcccgaaattgtgatgacccagtcacccgccactcttagcctttcacccggtg |
| Full-nt | | agcgcgcaaccctgtcttgcagagcctcccaagacatctcaaaataccttaattgg |
| | | tatcaacagaagcccggacaggctcctcgccttctgatctaccacaccagccggct |
| | | ccattctggaatccctgccaggttcagcggtagcggatctgggaccgactacaccc |
| | | tcactatcagctcactgcagccagaggacttcgctgtctatttctgtcagcaaggg |
| | | aacaccctgccctacacctttggacagggcaccaagctcgagattaaaggtggagg |
| | | tggcagcggaggaggtgggtccggcggtggaggaagccaggtccaactccaagaaa |
| | | gcggaccgggtcttgtgaagccatcagaaactctttcactgacttgtactgtgagc |
| | | ggagtgtctctccccgattacggggtgtcttggatcagacagccaccggggaaggg |
| | | tctggaatggattggagtgatttggggctctgagactacttactactcttcatccc |
| | | tcaagtcacgcgtcaccatctcaaaggacaactctaagaatcaggtgtcactgaaa |
| | | ctgtcatctgtgaccgcagccgacaccgccgtgtactattgcgctaagcattacta |
| | | ttatggcgggagctacgcaatggattactggggacagggtactctggtcaccgtgt |
| | | ccagcaccactaccccagcaccgaggccacccaccccggctcctaccatcgcctcc |
| | | cagcctctgtccctgcgtccggaggcatgtagacccgcagctggtggggccgtgca |
| | | tacccggggtcttgacttcgcctgcgatatctacatttgggcccctctggctggta |
| | | cttgcggggtcctgctgctttcactcgtgatcactctttactgtaagcgcggtcgg |
| | | aagaagctgctgtacatctttaagcaacccttcatgaggcctgtgcagactactca |
| | | agaggaggacggctgttcatgccggttcccagaggaggaggaaggcggctgcgaac |
| | | tgcgcgtgaaattcagccgcagcgcagatgctccagcctacaagcaggggcagaac |
| | | cagctctacaacgaactcaatcttggtcggagagaggagtacgacgtgctggacaa |
| | | gcggagaggacgggacccagaaatgggcgggaagccgcgcagaaagaatccccaag |
| | | agggcctgtacaacgagctccaaaaggataagatggcagaagcctatagcgagatt |
| | | ggtatgaaaggggaacgcagaagaggcaaaggccacgacggactgtaccagggact |
| | | cagcaccgccaccaaggacacctatgacgctcttcacatgcaggccctgccgcctc |
| | | gg |
| 104875 | 93 | MALPVTALLLPLALLLHAARPeivmtqspatlslspgeratlscrasqdiskylnw |
| CAR 1- | | yqqkpgqaprlliyhtsrlhsgiparfsgsgsgtdytltisslqpedfavyfcqqg |
| Full-aa | | ntlpytfgqgtkleikggggsggggsggggsqvqlqesgpglvkpsetlsltctvs |
| | | gvslpdygvswirqppgkglewigviwgsettyyssslksrvtiskdnsknqvslk |
| | | lssvtaadtavyycakhyyyggsyamdywgqgtlvtvsstttpaprpptpaptias |
| | | qplslrpeacrpaaggavhtrgldfacdiyiwaplagtcgvlllslvitlyckrgr |
| | | kkllyifkqpfmrpvqttqeedgcscrfpeeeeggcelrvkfsrsadapaykqgqn |
| | | qlynelnlgrreeydvldkrrgrdpemggkprrknpqeglynelqkdkmaeaysei |
| | | gmkgerrrgkghdglyqglstatkdtydalhmqalppr |

CAR2

| | | |
|---|---|---|
| CAR2 | 46 | eivmtqspatlslspgeratlscrasqdiskylnwyqqkpgqaprlliyhtsrlhs |
| scFv | | giparfsgsgsgtdytltisslqpedfavyfcqqgntlpytfgqgtkleikggggs |
| domain | | ggggsggggsqvqlqesgpglvkpsetlsltctvsgvslpdygvswirqppgkgle |
| | | wigviwgsettyyqsslksrvtiskdnsknqvslklssvtaadtavyycakhyyyg |
| | | gsyamdywgqgtlvtvss |
| 103102 | 58 | atggccctccctgtcaccgccctgctgcttccgctggctcttctgctccacgccgc |
| CAR2- | | tcggcccgaaattgtgatgacccagtcacccgccactcttagcctttcacccggtg |
| Soluble | | agcgcgcaaccctgtcttgcagagcctcccaagacatctcaaaataccttaattgg |
| scFv-nt | | tatcaacagaagcccggacaggctcctcgccttctgatctaccacaccagccggct |
| | | ccattctggaatccctgccaggttcagcggtagcggatctgggaccgactacaccc |
| | | tcactatcagctcactgcagccagaggacttcgctgtctatttctgtcagcaaggg |
| | | aacaccctgccctacacctttggacagggcaccaagctcgagattaaaggtggagg |
| | | tggcagcggaggaggtgggtccggcggtggaggaagccaggtccaactccaagaaa |
| | | gcggaccgggtcttgtgaagccatcagaaactctttcactgacttgtactgtgagc |
| | | ggagtgtctctccccgattacggggtgtcttggatcagacagccaccggggaaggg |
| | | tctggaatggattggagtgatttggggctctgagactacttactaccaatcatccc |
| | | tcaagtcacgcgtcaccatctcaaaggacaactctaagaatcaggtgtcactgaaa |
| | | ctgtcatctgtgaccgcagccgacaccgccgtgtactattgcgctaagcattacta |
| | | ttatggcgggagctacgcaatggattactggggacagggtactctggtcaccgtgt |
| | | ccagccaccaccatcatcaccatcaccat |
| 103102 | 70 | MALPVTALLLPLALLLHAARPeivmtqspatlslspgeratlscrasqdiskylnw |
| CAR2- | | yqqkpgqaprlliyhtsrlhsgiparfsgsgsgtdytltisslqpedfavyfcqqg |
| Soluble | | ntlpytfgqgtkleikggggsggggsggggsqvqlqesgpglvkpsetlsltctvs |
| scFv-aa | | gvslpdygvswirqppgkglewigviwgsettyyqsslksrvtiskdnsknqvslk |
| | | lssvtaadtavyycakhyyyggsyamdywgqgtlvtvsshhhhhhhh |
| 104876 | 82 | atggccctccctgtcaccgccctgctgcttccgctggctcttctgctccacgccgc |
| CAR 2- | | tcggcccgaaattgtgatgacccagtcacccgccactcttagcctttcacccggtg |
| Full-nt | | agcgcgcaaccctgtcttgcagagcctcccaagacatctcaaaataccttaattgg |
| | | tatcaacagaagcccggacaggctcctcgccttctgatctaccacaccagccggct |
| | | ccattctggaatccctgccaggttcagcggtagcggatctgggaccgactacaccc |
| | | tcactatcagctcactgcagccagaggacttcgctgtctatttctgtcagcaaggg |
| | | aacaccctgccctacacctttggacagggcaccaagctcgagattaaaggtggagg |
| | | tggcagcggaggaggtgggtccggcggtggaggaagccaggtccaactccaagaaa |
| | | gcggaccgggtcttgtgaagccatcagaaactctttcactgacttgtactgtgagc |
| | | ggagtgtctctccccgattacggggtgtcttggatcagacagccaccggggaaggg |
| | | tctggaatggattggagtgatttggggctctgagactacttactaccaatcatccc |
| | | tcaagtcacgcgtcaccatctcaaaggacaactctaagaatcaggtgtcactgaaa |
| | | ctgtcatctgtgaccgcagccgacaccgccgtgtactattgcgctaagcattacta |
| | | ttatggcgggagctacgcaatggattactggggacagggtactctggtcaccgtgt |
| | | ccagcaccactaccccagcaccgaggccacccaccccggctcctaccatcgcctcc |
| | | cagcctctgtccctgcgtccggaggcatgtagacccgcagctggtggggccgtgca |
| | | tacccggggtcttgacttcgcctgcgatatctacatttgggcccctctggctggta |
| | | cttgcggggtcctgctgctttcactcgtgatcactctttactgtaagcgcggtcgg |
| | | aagaagctgctgtacatctttaagcaacccttcatgaggcctgtgcagactactca |
| | | agaggaggacggctgttcatgccggttcccagaggaggaggaaggcggctgcgaac |
| | | tgcgcgtgaaattcagccgcagcgcagatgctccagcctacaagcaggggcagaac |
| | | cagctctacaacgaactcaatcttggtcggagagaggagtacgacgtgctggacaa |
| | | gcggagaggacgggacccagaaatgggcgggaagccgcgcagaaagaatccccaag |
| | | agggcctgtacaacgagctccaaaaggataagatggcagaagcctatagcgagatt |
| | | ggtatgaaaggggaacgcagaagaggcaaaggccacgacggactgtaccagggact |
| | | cagcaccgccaccaaggacacctatgacgctcttcacatgcaggccctgccgcctc |
| | | gg |
| 104876 | 94 | MALPVTALLLPLALLLHAARPeivmtqspatlslspgeratlscrasqdiskylnw |
| CAR 2- | | yqqkpgqaprlliyhtsrlhsgiparfsgsgsgtdytltisslqpedfavyfcqqg |
| Full-aa | | ntlpytfgqgtkleikggggsggggsggggsqvqlqesgpglvkpsetlsltctvs |
| | | gvslpdygvswirqppgkglewigviwgsettyyqsslksrvtiskdnsknqvslk |
| | | lssvtaadtavyycakhyyyggsyamdywgqgtivtvsstttpaprpptpaptias |
| | | qplslrpeacrpaaggavhtrgldfacdiyiwaplagtcgvlllslvitlyckrgr |
| | | kkllyifkqpfmrpvqttgeedgcscrfpeeeeggcelrvkfsrsadapaykqgqn |
| | | qlynelnlgrreeydvldkrrgrdpemggkprrknpqeglynelqkdkmaeaysei |
| | | gmkgerrrgkghdglyqglstatkdtydalhmqalppr |

CAR 3

| | | |
|---|---|---|
| CAR3 | 47 | qvqlqesgpglvkpsetlsltctvsgvslpdygvswirqppgkglewigviwgset |
| scFv | | tyyssslksrvtiskdnsknqvslklssvtaadtavyycakhyyyggsyamdywgq |
| domain | | gtlvtvssggggsggggsggggseivmtqspatlslspgeratlscrasqdiskyl |
| | | nwyqqkpgqaprlliyhtsrlhsgiparfsgsgsgtdytltisslqpedfavyfcq |
| | | qgntlpytfgqgtkleik |
| 103104 | 59 | atggctctgcccgtgaccgcactcctcctgccactggctctgctgcttcacgccgc |
| CAR 3- | | tcgcccacaagtccagcttcaagaatcagggcctggtctggtgaagccatctgaga |
| Soluble | | ctctgtccctcacttgcaccgtgagcggagtgtccctcccagactacggagtgagc |
| scFv-nt | | tggattagacagcctcccggaaagggactggagtggatcggagtgatttggggtag |
| | | cgaaaccacttactattcatcttccctgaagtcacgggtcaccatttcaaaggata |
| | | actcaaagaatcaagtgagcctcaagctctcatcagtcaccgccgctgacaccgcc |
| | | gtgtattactgtgccaagcattactactatggagggtcctacgccatggactactg |
| | | gggccagggaactctggtcactgtgtcatctggtggaggaggtagcggaggaggcg |
| | | ggagcggtggaggtggctccgaaatcgtgatgacccagagccctgcaaccctgtcc |
| | | ctttctcccggggaacgggctaccctttcttgtcgggcatcacaagatatctcaaa |
| | | atacctcaattggtatcaacagaagccgggacaggcccctaggcttcttatctacc |
| | | acacctctcgcctgcatagcgggattcccgcacgctttagcgggtctggaagcggg |
| | | accgactacactctgaccatctcatctctccagcccgaggacttcgccgtctactt |
| | | ctgccagcagggtaacaccctgccgtacaccttcggccagggcaccaagcttgaga |
| | | tcaaacatcaccaccatcatcaccatcac |
| 103104 | 71 | MALPVTALLLPLALLLHAARPqvqlqesgpglvkpsetlsltctvsgvslpdygvs |
| CAR 3- | | wirqppgkglewigviwgsettyyssslksrvtiskdnsknqvslklssvtaadta |
| Soluble | | vyycakhyyyggsyamdywgqgtlvtvssggggsggggsggggseivmtqspatls |
| scFv-aa | | lspgeratlscrasqdiskylnwyqqkpgqaprlliyhtsrlhsgiparfsgsgsg |
| | | tdytltisslqpedfavyfcqqgntlpytfgqgtkleikhhhhhhhh |
| 104877 | 83 | atggctctgcccgtgaccgcactcctcctgccactggctctgctgcttcacgccgc |
| CAR 3- | | tcgcccacaagtccagcttcaagaatcagggcctggtctggtgaagccatctgaga |
| Full-nt | | ctctgtccctcacttgcaccgtgagcggagtgtccctcccagactacggagtgagc |
| | | tggattagacagcctcccggaaagggactggagtggatcggagtgatttggggtag |
| | | cgaaaccacttactattcatcttccctgaagtcacgggtcaccatttcaaaggata |
| | | actcaaagaatcaagtgagcctcaagctctcatcagtcaccgccgctgacaccgcc |
| | | gtgtattactgtgccaagcattactactatggagggtcctacgccatggactactg |
| | | gggccagggaactctggtcactgtgtcatctggtggaggaggtagcggaggaggcg |
| | | ggagcggtggaggtggctccgaaatcgtgatgacccagagccctgcaaccctgtcc |
| | | ctttctcccggggaacgggctaccctttcttgtcgggcatcacaagatatctcaaa |
| | | atacctcaattggtatcaacagaagccgggacaggcccctaggcttcttatctacc |
| | | acacctctcgcctgcatagcgggattcccgcacgctttagcgggtctggaagcggg |
| | | accgactacactctgaccatctcatctctccagcccgaggacttcgccgtctactt |
| | | ctgccagcagggtaacaccctgccgtacaccttcggccagggcaccaagcttgaga |
| | | tcaaaaccactactcccgctccaaggccacccacccctgccccgaccatcgcctct |
| | | cagccgctttccctgcgtccggaggcatgtagacccgcagctggtggggccgtgca |
| | | tacccggggtcttgacttcgcctgcgatatctacatttgggcccctctggctggta |
| | | cttgcggggtcctgctgctttcactcgtgatcactctttactgtaagcgcggtcgg |
| | | aagaagctgctgtacatctttaagcaacccttcatgaggcctgtgcagactactca |
| | | agaggaggacggctgttcatgccggttcccagaggaggaggaaggcggctgcgaac |
| | | tgcgcgtgaaattcagccgcagcgcagatgctccagcctacaagcaggggcagaac |
| | | cagctctacaacgaactcaatcttggtcggagagaggagtacgacgtgctggacaa |
| | | gcggagaggacgggacccagaaatgggcgggaagccgcgcagaaagaatccccaag |
| | | agggcctgtacaacgagctccaaaaggataagatggcagaagcctatagcgagatt |
| | | ggtatgaaaggggaacgcagaagaggcaaaggccacgacggactgtaccagggact |
| | | cagcaccgccaccaaggacacctatgacgctcttcacatgcaggccctgccgcctc |
| | | gg |
| 104877 | 95 | MALPVTALLLPLALLLHAARPqvqlqesgpglvkpsetlsltctvsgvslpdygvs |
| CAR 3- | | wirqppgkglewigviwgsettyyssslksrvtiskdnsknqvslklssvtaadta |
| Full-aa | | vyycakhyyyggsyamdywgqgtivtvssggggsggggsggggseivmtqspatls |
| | | lspgeratlscrasqdiskylnwyqqkpgqaprlliyhtsrlhsgiparfsgsgsg |
| | | tdytltisslqpedfavyfcqqgntlpytfgqgtkleiktttpaprpptpaptias |
| | | qplslrpeacrpaaggavhtrgldfacdiyiwaplagtcgvlllslvitlyckrgr |
| | | kkllyifkqpfmrpvqttqeedgcscrfpeeeeggcelrvkfsrsadapaykqgqn |
| | | qlynelnlgrreeydvldkrrgrdpemggkprrknpqeglynelqkdkmaeaysei |
| | | gmkgerrrgkghdglyqglstatkdtydalhmqalppr |

CAR 4

| | | |
|---|---|---|
| CAR4 | 48 | qvqlqesgpglvkpsetlsltctvsgvslpdygvswirqppgkglewigviwgset |
| scBT | | tyyqsslksrvtiskdnsknqvslklssvtaadtavyycakhyyyggsyamdywgq |
| domain | | gtlvtvssggggsggggsggggseivmtqspatlslspgeratlscrasqdiskyl |
| | | nwyqqkpgqaprlliyhtsrlhsgiparfsgsgsgtdytltisslqpedfavyfcq |
| | | qgntlpytfgqgtkleik |
| 103106 | 60 | atggctctgcccgtgaccgcactcctcctgccactggctctgctgcttcacgccgc |
| CAR4- | | tcgcccacaagtccagcttcaagaatcagggcctggtctggtgaagccatctgaga |
| Soluble | | ctctgtccctcacttgcaccgtgagcggagtgtccctcccagactacggagtgagc |
| scFv-nt | | tggattagacagcctcccggaaagggactggagtggatcggagtgatttggggtag |
| | | cgaaaccacttactatcaatcttccctgaagtcacgggtcaccatttcaaaggata |
| | | actcaaagaatcaagtgagcctcaagctctcatcagtcaccgccgctgacaccgcc |
| | | gtgtattactgtgccaagcattactactatggagggtcctacgccatggactactg |
| | | gggccagggaactctggtcactgtgtcatctggtggaggaggtagcggaggaggcg |
| | | ggagcggtggaggtggctccgaaatcgtgatgacccagagccctgcaaccctgtcc |
| | | ctttctcccggggaacgggctaccctttcttgtcgggcatcacaagatatctcaaa |
| | | atacctcaattggtatcaacagaagccgggacaggcccctaggcttcttatctacc |
| | | acacctctcgcctgcatagcgggattcccgcacgctttagcgggtctggaagcggg |
| | | accgactacactctgaccatctcatctctccagcccgaggacttcgccgtctactt |
| | | ctgccagcagggtaacaccctgccgtacaccttcggccagggcaccaagcttgaga |
| | | tcaaacatcaccaccatcatcaccatcac |
| 103106 | 72 | MALPVTALLLPLALLLHAARPqvqlqesgpglvkpsetlsltctvsgvslpdygvs |
| CAR4- | | wirqppgkglewigviwgsettyyqsslksrvtiskdnsknqvslklssvtaadta |
| Soluble | | vyycakhyyyggsyamdywgqgtlvtvssggggsggggsggggseivmtqspatls |
| scFv-aa | | lspgeratlscrasqdiskylnwyqqkpgqaprlliyhtsrlhsgiparfsgsgsg |
| | | tdytltisslqpedfavyfcqqgntlpytfgqgtkleikhhhhhhhh |
| 104878 | 84 | atggctctgcccgtgaccgcactcctcctgccactggctctgctgcttcacgccgc |
| CAR 4- | | tcgcccacaagtccagcttcaagaatcagggcctggtctggtgaagccatctgaga |
| Full-nt | | ctctgtccctcacttgcaccgtgagcggagtgtccctcccagactacggagtgagc |
| | | tggattagacagcctcccggaaagggactggagtggatcggagtgatttggggtag |
| | | cgaaaccacttactatcaatcttccctgaagtcacgggtcaccatttcaaaggata |
| | | actcaaagaatcaagtgagcctcaagctctcatcagtcaccgccgctgacaccgcc |
| | | gtgtattactgtgccaagcattactactatggagggtcctacgccatggactactg |
| | | gggccagggaactctggtcactgtgtcatctggtggaggaggtagcggaggaggcg |
| | | ggagcggtggaggtggctccgaaatcgtgatgacccagagccctgcaaccctgtcc |
| | | ctttctcccggggaacgggctaccctttcttgtcgggcatcacaagatatctcaaa |
| | | atacctcaattggtatcaacagaagccgggacaggcccctaggcttcttatctacc |
| | | acacctctcgcctgcatagcgggattcccgcacgctttagcgggtctggaagcggg |
| | | accgactacactctgaccatctcatctctccagcccgaggacttcgccgtctactt |
| | | ctgccagcagggtaacaccctgccgtacaccttcggccagggcaccaagcttgaga |
| | | tcaaaaccactactcccgctccaaggccacccacccctgccccgaccatcgcctct |
| | | cagccgctttccctgcgtccggaggcatgtagacccgcagctggtggggccgtgca |
| | | tacccggggtcttgacttcgcctgcgatatctacatttgggcccctctggctggta |
| | | cttgcggggtcctgctgctttcactcgtgatcactctttactgtaagcgcggtcgg |
| | | aagaagctgctgtacatctttaagcaacccttcatgaggcctgtgcagactactca |
| | | agaggaggacggctgttcatgccggttcccagaggaggaggaaggcggctgcgaac |
| | | tgcgcgtgaaattcagccgcagcgcagatgctccagcctacaagcaggggcagaac |
| | | cagctctacaacgaactcaatcttggtcggagagaggagtacgacgtgctggacaa |
| | | gcggagaggacgggacccagaaatgggcgggaagccgcgcagaaagaatccccaag |
| | | agggcctgtacaacgagctccaaaaggataagatggcagaagcctatagcgagatt |
| | | ggtatgaaaggggaacgcagaagaggcaaaggccacgacggactgtaccagggact |
| | | cagcaccgccaccaaggacacctatgacgctcttcacatgcaggccctgccgcctc |
| | | gg |
| 104878 | 96 | MALPVTALLLPLALLLHAARPqvqlqesgpglvkpsetlsltctvsgvslpdygvs |
| CAR 4- | | wirqppgkglewigviwgsettyyqsslksrvtiskdnsknqvslklssvtaadta |
| Full-aa | | vyycakhyyyggsyamdywgqgtivtvssggggsggggsggggseivmtqspatls |
| | | lspgeratlscrasgdiskylnwyqqkpgqaprlliyhtsrlhsgiparfsgsgsg |
| | | tdytltisslqpedfavyfcqqgntlpytfgqgtkleiktttpaprpptpaptias |
| | | qplslrpeacrpaaggavhtrgldfacdiyiwaplagtcgvlllslvitlyckrgr |
| | | kkllyifkqpfmrpvqttgeedgcscrfpeeeeggcelrvkfsrsadapaykqgqn |
| | | qlynelnlgrreeydvldkrrgrdpemggkprrknpqeglynelqkdkmaeaysei |
| | | gmkgerrrgkghdglyqglstatkdtydalhmqalppr |

CAR5

| | | |
|---|---|---|
| CAR5 | 49 | eivmtqspatlslspgeratlscrasqdiskylnwyqqkpgqaprlliyhtsrlhs |
| scBT | | giparfsgsgsgtdytltisslqpedfavyfcqqgntlpytfgqgtkleikggggs |
| domain | | ggggsggggsggggsqvqlqesgpglvkpsetlsltctvsgvslpdygvswirqpp |
| | | gkglewigviwgsettyyssslksrvtiskdnsknqvslklssvtaadtavyycak |
| | | hyyyggsyamdywgqgtlvtvss |
| 99789 | 61 | atggccctcccagtgaccgctctgctgctgcctctcgcacttcttctccatgccgc |
| CAR5- | | tcggcctgagatcgtcatgacccaaagccccgctaccctgtccctgtcacccggcg |
| Soluble | | agagggcaaccctttcatgcagggccagccaggacatttctaagtacctcaactgg |
| scFv-nt | | tatcagcagaagccagggcaggctcctcgcctgctgatctaccacaccagccgcct |
| | | ccacagcggtatccccgccagattttccgggagcgggtctggaaccgactacaccc |
| | | tcaccatctcttctctgcagcccgaggatttcgccgtctatttctgccagcagggg |
| | | aatactctgccgtacaccttcggtcaaggtaccaagctggaaatcaagggaggcgg |
| | | aggatcaggcggtggcggaagcggaggaggtggctccggaggaggaggttcccaag |
| | | tgcagcttcaagaatcaggacccggacttgtgaagccatcagaaaccctctccctg |
| | | acttgtaccgtgtccggtgtgagcctccccgactacggagtctcttggattcgcca |
| | | gcctccggggaagggtcttgaatggattggggtgatttggggatcagagactactt |
| | | actactcttcatcacttaagtcacgggtcaccatcagcaaagataatagcaagaac |
| | | caagtgtcacttaagctgtcatctgtgaccgccgctgacaccgccgtgtactattg |
| | | tgccaaacattactattacggagggtcttatgctatggactactggggacagggga |
| | | ccctggtgactgtctctagccatcaccatcaccaccatcatcac |
| 99789 | 73 | MALPVTALLLPLALLLHAARPeivmtqspatlslspgeratlscrasqdiskylnw |
| CAR5- | | yqqkpgqaprlliyhtsrlhsgiparfsgsgsgtdytltisslqpedfavyfcqqg |
| Soluble | | ntlpytfgqgtkleikggggsggggsggggsggggsqvqlqesgpglvkpsetlsl |
| scFv-aa | | tctvsgvslpdygvswirqppgkglewigviwgsettyyssslksrvtiskdnskn |
| | | qvslklssvtaadtavyycakhyyyggsyamdywgqgtivtvsshhhhhhhh |
| 104879 | 85 | atggccctccctgtcaccgccctgctgcttccgctggctcttctgctccacgccgc |
| CAR 5- | | tcggcccgaaattgtgatgacccagtcacccgccactcttagcctttcacccggtg |
| | | agcgcgcaaccctgtcttgcagagcctcccaagacatctcaaaataccttaattgg |
| Full-nt | | tatcaacagaagcccggacaggctcctcgccttctgatctaccacaccagccggct |
| | | ccattctggaatccctgccaggttcagcggtagcggatctgggaccgactacaccc |
| | | tcactatcagctcactgcagccagaggacttcgctgtctatttctgtcagcaaggg |
| | | aacaccctgccctacacctttggacagggcaccaagctcgagattaaaggtggagg |
| | | tggcagcggaggaggtgggtccggcggtggaggaagcggcggaggcgggagccagg |
| | | tccaactccaagaaagcggaccgggtcttgtgaagccatcagaaactctttcactg |
| | | acttgtactgtgagcggagtgtctctccccgattacggggtgtcttggatcagaca |
| | | gccaccggggaagggtctggaatggattggagtgatttggggctctgagactactt |
| | | actactcttcatccctcaagtcacgcgtcaccatctcaaaggacaactctaagaat |
| | | caggtgtcactgaaactgtcatctgtgaccgcagccgacaccgccgtgtactattg |
| | | cgctaagcattactattatggcgggagctacgcaatggattactggggacagggta |
| | | ctctggtcaccgtgtccagcaccactaccccagcaccgaggccacccaccccggct |
| | | cctaccatcgcctcccagcctctgtccctgcgtccggaggcatgtagacccgcagc |
| | | tggtggggccgtgcatacccggggtcttgacttcgcctgcgatatctacatttggg |
| | | cccctctggctggtacttgcggggtcctgctgctttcactcgtgatcactctttac |
| | | tgtaagcgcggtcggaagaagctgctgtacatctttaagcaacccttcatgaggcc |
| | | tgtgcagactactcaagaggaggacggctgttcatgccggttcccagaggaggagg |
| | | aaggcggctgcgaactgcgcgtgaaattcagccgcagcgcagatgctccagcctac |
| | | aagcaggggcagaaccagctctacaacgaactcaatcttggtcggagagaggagta |
| | | cgacgtgctggacaagcggagaggacgggacccagaaatgggcgggaagccgcgca |
| | | gaaagaatccccaagagggcctgtacaacgagctccaaaaggataagatggcagaa |
| | | gcctatagcgagattggtatgaaaggggaacgcagaagaggcaaaggccacgacgg |
| | | actgtaccagggactcagcaccgccaccaaggacacctatgacgctcttcacatgc |
| | | aggccctgccgcctcgg |
| 104879 | 97 | MALPVTALLLPLALLLHAARPeivmtqspatlslspgeratlscrasqdiskylnw |
| CAR 5- | | yqqkpgqaprlliyhtsrlhsgiparfsgsgsgtdytltisslqpedfavyfcqqg |
| Full-aa | | ntlpytfgqgtkleikggggsggggsggggsggggsqvqlqesgpglvkpsetlsl |
| | | tctvsgvslpdygvswirqppgkglewigviwgsettyyssslksrvtiskdnskn |
| | | qvslklssvtaadtavyycakhyyyggsyamdywgqgtivtvsstttpaprpptpa |
| | | ptiasqplslrpeacrpaaggavhtrgldfacdiyiwaplagtcgvlllslvitly |
| | | ckrgrkkllyifkqpfmrpvqttgeedgcscrfpeeeeggcelrvkfsrsadapay |
| | | kqgqnqlynelnlgrreeydvldkrrgrdpemggkprrknpqeglynelqkdkmae |
| | | ayseigmkgerrrgkghdglyqglstatkdtydalhmqalppr |

CAR 6

| | | |
|---|---|---|
| CAR6 | 50 | eivmtqspatlslspgeratlscrasqdiskylnwyqqkpgqaprlliyhtsrlhs |
| scFv | | giparfsgsgsgtdytltisslqpedfavyfcqqgntlpytfgqgtkleikggggs |
| domain | | ggggsggggsggggsqvqlqesgpglvkpsetlsltctvsgvslpdygvswirqpp |
| | | gkglewigviwgsettyyqsslksrvtiskdnsknqvslklssvtaadtavyycak |
| | | hyyyggsyamdywgqgtlvtvss |
| 99790 | 62 | atggccctcccagtgaccgctctgctgctgcctctcgcacttcttctccatgccgc |
| CAR6- | | tcggcctgagatcgtcatgacccaaagccccgctaccctgtccctgtcacccggcg |
| Soluble | | agagggcaaccctttcatgcagggccagccaggacatttctaagtacctcaactgg |
| scFv-nt | | tatcagcagaagccagggcaggctcctcgcctgctgatctaccacaccagccgcct |
| | | ccacagcggtatccccgccagattttccgggagcgggtctggaaccgactacaccc |
| | | tcaccatctcttctctgcagcccgaggatttcgccgtctatttctgccagcagggg |
| | | aatactctgccgtacaccttcggtcaaggtaccaagctggaaatcaagggaggcgg |
| | | aggatcaggcggtggcggaagcggaggaggtggctccggaggaggaggttcccaag |
| | | tgcagcttcaagaatcaggacccggacttgtgaagccatcagaaaccctctccctg |
| | | acttgtaccgtgtccggtgtgagcctccccgactacggagtctcttggattcgcca |
| | | gcctccggggaagggtcttgaatggattggggtgatttggggatcagagactactt |
| | | actaccagtcatcacttaagtcacgggtcaccatcagcaaagataatagcaagaac |
| | | caagtgtcacttaagctgtcatctgtgaccgccgctgacaccgccgtgtactattg |
| | | tgccaaacattactattacggagggtcttatgctatggactactggggacagggga |
| | | ccctggtgactgtctctagccatcaccatcaccaccatcatcac |
| 99790 | 74 | MALPVTALLLPLALLLHAARPeivmtqspatlslspgeratlscrasqdiskylnw |
| CAR6- | | yqqkpgqaprlliyhtsrlhsgiparfsgsgsgtdytltisslqpedfavyfcqqg |
| Soluble | | ntlpytfgqgtkleikggggsggggsggggsggggsqvqlqesgpglvkpsetlsl |
| scFv-aa | | tctvsgvslpdygvswirqppgkglewigviwgsettyyqsslksrvtiskdnskn |
| | | qvslklssvtaadtavyycakhyyyggsyamdywgqgtivtvsshhhhhhhh |
| 104880 | 86 | atggccctccctgtcaccgccctgctgcttccgctggctcttctgctccacgccgc |
| CAR6- | | tcggcccgaaattgtgatgacccagtcacccgccactcttagcctttcacccggtg |
| Full-nt | | agcgcgcaaccctgtcttgcagagcctcccaagacatctcaaaataccttaattgg |
| | | tatcaacagaagcccggacaggctcctcgccttctgatctaccacaccagccggct |
| | | ccattctggaatccctgccaggttcagcggtagcggatctgggaccgactacaccc |
| | | tcactatcagctcactgcagccagaggacttcgctgtctatttctgtcagcaaggg |
| | | aacaccctgccctacacctttggacagggcaccaagctcgagattaaaggtggagg |
| | | tggcagcggaggaggtgggtccggcggtggaggaagcggaggcggagggagccagg |
| | | tccaactccaagaaagcggaccgggtcttgtgaagccatcagaaactctttcactg |
| | | acttgtactgtgagcggagtgtctctccccgattacggggtgtcttggatcagaca |
| | | gccaccggggaagggtctggaatggattggagtgatttggggctctgagactactt |
| | | actaccaatcatccctcaagtcacgcgtcaccatctcaaaggacaactctaagaat |
| | | caggtgtcactgaaactgtcatctgtgaccgcagccgacaccgccgtgtactattg |
| | | cgctaagcattactattatggcgggagctacgcaatggattactggggacagggta |
| | | ctctggtcaccgtgtccagcaccactaccccagcaccgaggccacccaccccggct |
| | | cctaccatcgcctcccagcctctgtccctgcgtccggaggcatgtagacccgcagc |
| | | tggtggggccgtgcatacccggggtcttgacttcgcctgcgatatctacatttggg |
| | | cccctctggctggtacttgcggggtcctgctgctttcactcgtgatcactctttac |
| | | tgtaagcgcggtcggaagaagctgctgtacatctttaagcaacccttcatgaggcc |
| | | tgtgcagactactcaagaggaggacggctgttcatgccggttcccagaggaggagg |
| | | aaggcggctgcgaactgcgcgtgaaattcagccgcagcgcagatgctccagcctac |
| | | aagcaggggcagaaccagctctacaacgaactcaatcttggtcggagagaggagta |
| | | cgacgtgctggacaagcggagaggacgggacccagaaatgggcgggaagccgcgca |
| | | gaaagaatccccaagagggcctgtacaacgagctccaaaaggataagatggcagaa |
| | | gcctatagcgagattggtatgaaaggggaacgcagaagaggcaaaggccacgacgg |
| | | actgtaccagggactcagcaccgccaccaaggacacctatgacgctcttcacatgc |
| | | aggccctgccgcctcgg |
| 104880 | 98 | MALPVTALLLPLALLLHAARPeivmtqspatlslspgeratlscrasqdiskylnw |
| CAR6- | | yqqkpgqaprlliyhtsrlhsgiparfsgsgsgtdytltisslqpedfavyfcqqg |
| Full-aa | | ntlpytfgqgtkleikggggsggggsggggsggggsqvqlqesgpglvkpsetlsl |
| | | tctvsgvslpdygvswirqppgkglewigviwgsettyyqsslksrvtiskdnsks |
| | | qvslklssvtaadtavyycakhyyyggsyamdywgqgtivtvsstttpaprpptpa |
| | | ptiasqplslrpeacrpaaggavhtrgldfacdiyiwaplagtcgylllslvitly |
| | | ckrgrkkllyifkufmrpvqttcleedgcscrfpeeeeggcelrykfsrsadapay |
| | | kqgqnqlynelnlgrreeydvldkrrgrdpemggkprrknpqeglynelqkdkmae |
| | | ayseigmkgerrrgkghdglyqglstatkdtydalhmcialppr |

CAR 7

| | | |
|---|---|---|
| CAR7 | 51 | qvqlqesgpglvkpsetlsltctvsgvslpdygvswirqppgkglewigviwgset |
| scFv | | tyyssslksrvtiskdnsknqvslklssvtaadtavyycakhyyyggsyamdywgq |
| domain | | gtlvtvssggggsggggsggggsggggseivmtqspatlslspgeratlscrasqd |
| | | iskylnwyqqkpgqaprlliyhtsrlhsgiparfsgsgsgtdytltisslqpedfa |
| | | vyfcqqgntlpytfgqgtkleik |
| 100796 | 63 | atggcactgcctgtcactgccctcctgctgcctctggccctccttctgcatgccgc |
| CAR7- | | caggccccaagtccagctgcaagagtcaggacccggactggtgaagccgtctgaga |
| Soluble | | ctctctcactgacttgtaccgtcagcggcgtgtccctccccgactacggagtgtca |
| scFv-nt | | tggatccgccaacctcccgggaaagggcttgaatggattggtgtcatctggggttc |
| | | tgaaaccacctactactcatcttccctgaagtccagggtgaccatcagcaaggata |
| | | attccaagaaccaggtcagccttaagctgtcatctgtgaccgctgctgacaccgcc |
| | | gtgtattactgcgccaagcactactattacggaggaagctacgctatggactattg |
| | | gggacagggcactctcgtgactgtgagcagcggcggtggagggtctggaggtggag |
| | | gatccggtggtggtgggtcaggcggaggagggagcgagattgtgatgactcagtca |
| | | ccagccaccctttctctttcacccggcgagagagcaaccctgagctgtagagccag |
| | | ccaggacatttctaagtacctcaactggtatcagcaaaaaccggggcaggcccctc |
| | | gcctcctgatctaccatacctcacgccttcactctggtatccccgctcggtttagc |
| | | ggatcaggatctggtaccgactacactctgaccatttccagcctgcagccagaaga |
| | | tttcgcagtgtatttctgccagcagggcaatacccttccttacaccttcggtcagg |
| | | gaaccaagctcgaaatcaagcaccatcaccatcatcaccaccat |
| 100796 | 75 | MALPVTALLLPLALLLHAARPqvqlqesgpglvkpsetlsltctvsgvslpdygvs |
| CAR7- | | wirqppgkglewigviwgsettyyssslksrvtiskdnsknqvslklssvtaadta |
| Soluble | | vyycakhyyyggsyamdywgqgtivtvssggggsggggsggggsggggseivmtqs |
| scFv-aa | | patlslspgeratlscrasqdiskylnwyqqkpgqaprlliyhtsrlhsgiparfs |
| | | gsgsgtdytltisslqpedfavyfcqqgntlpytfgqgtkleikhhhhhhhh |
| 104881 | 87 | atggctctgcccgtgaccgcactcctcctgccactggctctgctgcttcacgccgc |
| CAR 7 | | tcgcccacaagtccagcttcaagaatcagggcctggtctggtgaagccatctgaga |
| Full-nt | | ctctgtccctcacttgcaccgtgagcggagtgtccctcccagactacggagtgagc |
| | | tggattagacagcctcccggaaagggactggagtggatcggagtgatttggggtag |
| | | cgaaaccacttactattcatcttccctgaagtcacgggtcaccatttcaaaggata |
| | | actcaaagaatcaagtgagcctcaagctctcatcagtcaccgccgctgacaccgcc |
| | | gtgtattactgtgccaagcattactactatggagggtcctacgccatggactactg |
| | | gggccagggaactctggtcactgtgtcatctggtggaggaggtagcggaggaggcg |
| | | ggagcggtggaggtggctccggaggtggcggaagcgaaatcgtgatgacccagagc |
| | | cctgcaaccctgtccctttctcccggggaacgggctaccctttcttgtcgggcatc |
| | | acaagatatctcaaaatacctcaattggtatcaacagaagccgggacaggccccta |
| | | ggcttcttatctaccacacctctcgcctgcatagcgggattcccgcacgctttagc |
| | | gggtctggaagcgggaccgactacactctgaccatctcatctctccagcccgagga |
| | | cttcgccgtctacttctgccagcagggtaacaccctgccgtacaccttcggccagg |
| | | gcaccaagcttgagatcaaaaccactactcccgctccaaggccacccacccctgcc |
| | | ccgaccatcgcctctcagccgctttccctgcgtccggaggcatgtagacccgcagc |
| | | tggtggggccgtgcatacccggggtcttgacttcgcctgcgatatctacatttggg |
| | | cccctctggctggtacttgcggggtcctgctgctttcactcgtgatcactctttac |
| | | tgtaagcgcggtcggaagaagctgctgtacatctttaagcaacccttcatgaggcc |
| | | tgtgcagactactcaagaggaggacggctgttcatgccggttcccagaggaggagg |
| | | aaggcggctgcgaactgcgcgtgaaattcagccgcagcgcagatgctccagcctac |
| | | aagcaggggcagaaccagctctacaacgaactcaatcttggtcggagagaggagta |
| | | cgacgtgctggacaagcggagaggacgggacccagaaatgggcgggaagccgcgca |
| | | gaaagaatccccaagagggcctgtacaacgagctccaaaaggataagatggcagaa |
| | | gcctatagcgagattggtatgaaaggggaacgcagaagaggcaaaggccacgacgg |
| | | actgtaccagggactcagcaccgccaccaaggacacctatgacgctcttcacatgc |
| | | aggccctgccgcctcgg |
| 104881 | 99 | MALPVTALLLPLALLLHAARPqvqlqesgpglvkpsetlsltctvsgvslpdygvs |
| CAR 7 | | wirqppgkglewigviwgsettyyssslksrvtiskdnsknqvslklssvtaadta |
| Full-aa | | vyycakhyyyggsyamdywgqgtivtvssggggsggggsggggsggggseivmtqs |
| | | patlslspgeratlscrasqdiskylnwyqqkpgqaprlliyhtsrlhsgiparfs |
| | | gsgsgtdytltisslqpedfavyfcqqgntlpytfgqgtkleiktttpaprpptpa |
| | | ptiasqplslrpeacrpaaggavhtrgldfacdiyiwaplagtcgvlllslvitly |
| | | ckrgrkkllyifkqpfmrpvqttgeedgcscrfpeeeeggcelrvkfsrsadapay |
| | | kqgqnqlynelnlgrreeydvldkrrgrdpemggkprrknpqeglynelqkdkmae |
| | | ayseigmkgerrrgkghdglyqglstatkdtydalhmqalppr |

CAR8

| | | |
|---|---|---|
| CAR8 | 52 | qvqlqesgpglvkpsetlsltctvsgvslpdygvswirqppgkglewigviwgset |
| scFv | | tyyqsslksrvtiskdnsknqvslklssvtaadtavyycakhyyyggsyamdywgq |
| domain | | gtivtvssggggsggggsggggsggggseivmtqspatlslspgeratlscrasqd |
| | | iskylnwyqqkpgqaprlliyhtsrlhsgiparfsgsgsgtdytltisslqpedfa |
| | | vyfcqqgntlpytfgqgtkleik |
| 100798 | 64 | atggcactgcctgtcactgccctcctgctgcctctggccctccttctgcatgccgc |
| CAR8- | | caggccccaagtccagctgcaagagtcaggacccggactggtgaagccgtctgaga |
| Soluble | | ctctctcactgacttgtaccgtcagcggcgtgtccctccccgactacggagtgtca |
| scFv-nt | | tggatccgccaacctcccgggaaagggcttgaatggattggtgtcatctggggttc |
| | | tgaaaccacctactaccagtcttccctgaagtccagggtgaccatcagcaaggata |
| | | attccaagaaccaggtcagccttaagctgtcatctgtgaccgctgctgacaccgcc |
| | | gtgtattactgcgccaagcactactattacggaggaagctacgctatggactattg |
| | | gggacagggcactctcgtgactgtgagcagcggcggtggagggtctggaggtggag |
| | | gatccggtggtggtgggtcaggcggaggagggagcgagattgtgatgactcagtca |
| | | ccagccaccctttctctttcacccggcgagagagcaaccctgagctgtagagccag |
| | | ccaggacatttctaagtacctcaactggtatcagcaaaaaccggggcaggcccctc |
| | | gcctcctgatctaccatacctcacgccttcactctggtatccccgctcggtttagc |
| | | ggatcaggatctggtaccgactacactctgaccatttccagcctgcagccagaaga |
| | | tttcgcagtgtatttctgccagcagggcaatacccttccttacaccttcggtcagg |
| | | gaaccaagctcgaaatcaagcaccatcaccatcatcatcaccac |
| 100798 | 76 | MALPVTALLLPLALLLHAARPqvqlqesgpglvkpsetlsltctvsgvslpdygvs |
| CAR8- | | wirqppgkglewigviwgsettyyqsslksrvtiskdnsknqvslklssvtaadta |
| Soluble | | vyycakhyyyggsyamdywgqgtivtvssggggsggggsggggsggggseivmtqs |
| scFv-aa | | patlslspgeratlscrasqdiskylnwyqqkpgqaprlliyhtsrlhsgiparfs |
| | | gsgsgtdytltisslqpedfavyfcqqgntlpytfgqgtkleikhhhhhhhh |
| 104882 | 88 | atggctctgcccgtgaccgcactcctcctgccactggctctgctgcttcacgccgc |
| CAR 8- | | tcgcccacaagtccagcttcaagaatcagggcctggtctggtgaagccatctgaga |
| Full-nt | | ctctgtccctcacttgcaccgtgagcggagtgtccctcccagactacggagtgagc |
| | | tggattagacagcctcccggaaagggactggagtggatcggagtgatttggggtag |
| | | cgaaaccacttactatcaatcttccctgaagtcacgggtcaccatttcaaaggata |
| | | actcaaagaatcaagtgagcctcaagctctcatcagtcaccgccgctgacaccgcc |
| | | gtgtattactgtgccaagcattactactatggagggtcctacgccatggactactg |
| | | gggccagggaactctggtcactgtgtcatctggtggaggaggtagcggaggaggcg |
| | | ggagcggtggaggtggctccggaggcggtgggtcagaaatcgtgatgacccagagc |
| | | cctgcaaccctgtccctttctcccggggaacgggctaccctttcttgtcgggcatc |
| | | acaagatatctcaaaatacctcaattggtatcaacagaagccgggacaggccccta |
| | | ggcttcttatctaccacacctctcgcctgcatagcgggattcccgcacgctttagc |
| | | gggtctggaagcgggaccgactacactctgaccatctcatctctccagcccgagga |
| | | cttcgccgtctacttctgccagcagggtaacaccctgccgtacaccttcggccagg |
| | | gcaccaagcttgagatcaaaaccactactcccgctccaaggccacccacccctgcc |
| | | ccgaccatcgcctctcagccgctttccctgcgtccggaggcatgtagacccgcagc |
| | | tggtggggccgtgcatacccggggtcttgacttcgcctgcgatatctacatttggg |
| | | cccctctggctggtacttgcggggtcctgctgctttcactcgtgatcactctttac |
| | | tgtaagcgcggtcggaagaagctgctgtacatctttaagcaacccttcatgaggcc |
| | | tgtgcagactactcaagaggaggacggctgttcatgccggttcccagaggaggagg |
| | | aaggcggctgcgaactgcgcgtgaaattcagccgcagcgcagatgctccagcctac |
| | | aagcaggggcagaaccagctctacaacgaactcaatcttggtcggagagaggagta |
| | | cgacgtgctggacaagcggagaggacgggacccagaaatgggcgggaagccgcgca |
| | | gaaagaatccccaagagggcctgtacaacgagctccaaaaggataagatggcagaa |
| | | gcctatagcgagattggtatgaaaggggaacgcagaagaggcaaaggccacgacgg |
| | | actgtaccagggactcagcaccgccaccaaggacacctatgacgctcttcacatgc |
| | | aggccctgccgcctcgg |
| 104882 | 100 | MALPVTALLLPLALLLHAARPqvqlqesgpglvkpsetlsltctvsgvslpdygvs |
| CAR 8- | | wirqppgkglewigviwgsettyygsslksrvtiskdnsknqvslklssvtaadta |
| Full-aa | | vyycakhyyyggsyamdywgqgtivtvssggggsggggsggggsggggseivmtqs |
| | | patlslspgeratlscrasqdiskylnwyqqkpgqaprlliyhtsrlhsgiparfs |
| | | gsgsgtdytltisslqpedfavyfcqqgntlpytfgqgtkleiktttpaprpptpa |
| | | ptiasqplslrpeacrpaaggavhtrgldfacdiyiwaplagtcgvlllslvitly |
| | | ckrgrkkllyifkqpfmrpvqttgeedgcscrfpeeeeggcelrvkfsrsadapay |
| | | kqgqnqlynelnlgrreeydvldkrrgrdpemggkprrknpqeglynelqkdkmae |
| | | ayseigmkgerrrgkghdglyqglstatkdtydalhmqalppr |

CAR 9

| | | |
|---|---|---|
| CAR9 | 53 | eivmtqspatlslspgeratlscrasqdiskylnwyqqkpgqaprlliyhtsrlhs |
| scFv | | giparfsgsgsgtdytltisslqpedfavyfcqqgntlpytfgqgtkleikggggs |
| domain | | ggggsggggsggggsqvqlqesgpglvkpsetlsltctvsgvslpdygvswirqpp |
| | | gkglewigviwgsettyynsslksrvtiskdnsknqvslklssvtaadtavyycak |
| | | hyyyggsyamdywgqgtlvtvss |
| 99789 | 65 | atggccctcccagtgaccgctctgctgctgcctctcgcacttcttctccatgccgc |
| CAR9- | | tcggcctgagatcgtcatgacccaaagccccgctaccctgtccctgtcacccggcg |
| Soluble | | agagggcaaccctttcatgcagggccagccaggacatttctaagtacctcaactgg |
| scFv-nt | | tatcagcagaagccagggcaggctcctcgcctgctgatctaccacaccagccgcct |
| | | ccacagcggtatccccgccagattttccgggagcgggtctggaaccgactacaccc |
| | | tcaccatctcttctctgcagcccgaggatttcgccgtctatttctgccagcagggg |
| | | aatactctgccgtacaccttcggtcaaggtaccaagctggaaatcaagggaggcgg |
| | | aggatcaggcggtggcggaagcggaggaggtggctccggaggaggaggttcccaag |
| | | tgcagcttcaagaatcaggacccggacttgtgaagccatcagaaaccctctccctg |
| | | acttgtaccgtgtccggtgtgagcctccccgactacggagtctcttggattcgcca |
| | | gcctccggggaagggtcttgaatggattggggtgatttggggatcagagactactt |
| | | actacaattcatcacttaagtcacgggtcaccatcagcaaagataatagcaagaac |
| | | caagtgtcacttaagctgtcatctgtgaccgccgctgacaccgccgtgtactattg |
| | | tgccaaacattactattacggagggtcttatgctatggactactggggacagggga |
| | | ccctggtgactgtctctagccatcaccatcaccaccatcatcac |
| 99789 | 77 | MALPVTALLLPLALLLHAARPeivmtqspatlslspgeratlscrasqdiskylnw |
| CAR9- | | yqqkpgqaprlliyhtsrlhsgiparfsgsgsgtdytltisslqpedfavyfcqqg |
| Soluble | | ntlpytfgqgtkleikggggsggggsggggsggggsqvqlqesgpglvkpsetlsl |
| scFv-aa | | tctvsgvslpdygvswirqppgkglewigviwgsettyynsslksrvtiskdnskn |
| | | qvslklssvtaadtavyycakhyyyggsyamdywgqgtivtvsshhhhhhhh |
| 105974 | 89 | atggccctccctgtcaccgccctgctgcttccgctggctcttctgctccacgccgc |
| CAR9- | | tcggcccgaaattgtgatgacccagtcacccgccactcttagcctttcacccggtg |
| Full-nt | | agcgcgcaaccctgtcttgcagagcctcccaagacatctcaaaataccttaattgg |
| | | tatcaacagaagcccggacaggctcctcgccttctgatctaccacaccagccggct |
| | | ccattctggaatccctgccaggttcagcggtagcggatctgggaccgactacaccc |
| | | tcactatcagctcactgcagccagaggacttcgctgtctatttctgtcagcaaggg |
| | | aacaccctgccctacacctttggacagggcaccaagctcgagattaaaggtggagg |
| | | tggcagcggaggaggtgggtccggcggtggaggaagcggaggcggtgggagccagg |
| | | tccaactccaagaaagcggaccgggtcttgtgaagccatcagaaactctttcactg |
| | | acttgtactgtgagcggagtgtctctccccgattacggggtgtcttggatcagaca |
| | | gccaccggggaagggtctggaatggattggagtgatttggggctctgagactactt |
| | | actacaactcatccctcaagtcacgcgtcaccatctcaaaggacaactctaagaat |
| | | caggtgtcactgaaactgtcatctgtgaccgcagccgacaccgccgtgtactattg |
| | | cgctaagcattactattatggcgggagctacgcaatggattactggggacagggta |
| | | ctctggtcaccgtgtccagcaccactaccccagcaccgaggccacccaccccggct |
| | | cctaccatcgcctcccagcctctgtccctgcgtccggaggcatgtagacccgcagc |
| | | tggtggggccgtgcatacccggggtcttgacttcgcctgcgatatctacatttggg |
| | | cccctctggctggtacttgcggggtcctgctgctttcactcgtgatcactctttac |
| | | tgtaagcgcggtcggaagaagctgctgtacatctttaagcaacccttcatgaggcc |
| | | tgtgcagactactcaagaggaggacggctgttcatgccggttcccagaggaggagg |
| | | aaggcggctgcgaactgcgcgtgaaattcagccgcagcgcagatgctccagcctac |
| | | aagcaggggcagaaccagctctacaacgaactcaatcttggtcggagagaggagta |
| | | cgacgtgctggacaagcggagaggacgggacccagaaatgggcgggaagccgcgca |
| | | gaaagaatccccaagagggcctgtacaacgagctccaaaaggataagatggcagaa |
| | | gcctatagcgagattggtatgaaaggggaacgcagaagaggcaaaggccacgacgg |
| | | actgtaccagggactcagcaccgccaccaaggacacctatgacgctcttcacatgc |
| | | aggccctgccgcctcgg |
| 105974 | 101 | MALPVTALLLPLALLLHAARPeivmtqspatlslspgeratlscrasqdiskylnw |
| CAR 9- | | yqqkpgqaprlliyhtsrlhsgiparfsgsgsgtdytltisslqpedfavyfcqqg |
| Full-aa | | ntlpytfgqgtkleikggggsggggsggggsggggsqvcilqesgpglvkpsetlsl |
| | | tctvsgvslpdygvswirqppgkglewigviwgsettyynsslksrvtiskdnsks |
| | | qvslklssvtaadtavyycakhyyyggsyamdywgqgtivtvsstttpaprpptpa |
| | | ptiasqplslrpeacrpaaggavhtrgldfacdiyiwaplagtcgylllslvitly |
| | | ckrgrkkllyifkufmrpvqttcleedgcscrfpeeeeggcelrykfsrsadapay |
| | | kqgqnqlynelnlgrreeydvldkrrgrdpemggkprrknpqeglynelqkdkmae |
| | | ayseigmkgerrrgkghdglyqglstatkdtydalhmcialppr |

CAR10

| | | |
|---|---|---|
| CAR10 | 54 | qvqlqesgpglvkpsetlsltctvsgvslpdygvswirqppgkglewigviwgset |
| scFv | | tyynsslksrvtiskdnsknqvslklssvtaadtavyycakhyyyggsyamdywgq |
| domain | | gtlvtvssggggsggggsggggsggggseivmtqspatlslspgeratlscrasqd |
| | | iskylnwyqqkpgqaprlliyhtsrlhsgiparfsgsgsgtdytltisslqpedfa |
| | | vyfcqqgntlpytfgqgtkleik |
| 100796 | 66 | atggcactgcctgtcactgccctcctgctgcctctggccctccttctgcatgccgc |
| CAR10- | | caggccccaagtccagctgcaagagtcaggacccggactggtgaagccgtctgaga |
| Soluble | | ctctctcactgacttgtaccgtcagcggcgtgtccctccccgactacggagtgtca |
| scFv-nt | | tggatccgccaacctcccgggaaagggcttgaatggattggtgtcatctggggttc |
| | | tgaaaccacctactacaactcttccctgaagtccagggtgaccatcagcaaggata |
| | | attccaagaaccaggtcagccttaagctgtcatctgtgaccgctgctgacaccgcc |
| | | gtgtattactgcgccaagcactactattacggaggaagctacgctatggactattg |
| | | gggacagggcactctcgtgactgtgagcagcggcggtggagggtctggaggtggag |
| | | gatccggtggtggtgggtcaggcggaggagggagcgagattgtgatgactcagtca |
| | | ccagccaccctttctctttcacccggcgagagagcaaccctgagctgtagagccag |
| | | ccaggacatttctaagtacctcaactggtatcagcaaaaaccggggcaggcccctc |
| | | gcctcctgatctaccatacctcacgccttcactctggtatccccgctcggtttagc |
| | | ggatcaggatctggtaccgactacactctgaccatttccagcctgcagccagaaga |
| | | tttcgcagtgtatttctgccagcagggcaatacccttccttacaccttcggtcagg |
| | | gaaccaagctcgaaatcaagcaccatcaccatcatcaccaccat |
| 100796 | 78 | MALPVTALLLPLALLLHAARPqvqlqesgpglvkpsetlsltctvsgvslpdygvs |
| CAR10- | | wirqppgkglewigviwgsettyynsslksrvtiskdnsknqvslklssvtaadta |
| Soluble | | vyycakhyyyggsyamdywgqgtlvtvssggggsggggsggggsggggseivmtqs |
| scFv-aa | | patlslspgeratlscrasqdiskylnwyqqkpgqaprlliyhtsrlhsgiparfs |
| | | gsgsgtdytltisslqpedfavyfcqqgntlpytfgqgtkleikhhhhhhhh |
| 105975 | 90 | atggccctccctgtcaccgccctgctgcttccgctggctcttctgctccacgccgc |
| CAR 10 | | tcggcccgaaattgtgatgacccagtcacccgccactcttagcctttcacccggtg |
| Full-nt | | agcgcgcaaccctgtcttgcagagcctcccaagacatctcaaaataccttaattgg |
| | | tatcaacagaagcccggacaggctcctcgccttctgatctaccacaccagccggct |
| | | ccattctggaatccctgccaggttcagcggtagcggatctgggaccgactacaccc |
| | | tcactatcagctcactgcagccagaggacttcgctgtctatttctgtcagcaaggg |
| | | aacaccctgccctacacctttggacagggcaccaagctcgagattaaaggtggagg |
| | | tggcagcggaggaggtgggtccggcggtggaggaagcggaggcggtgggagccagg |
| | | tccaactccaagaaagcggaccgggtcttgtgaagccatcagaaactctttcactg |
| | | acttgtactgtgagcggagtgtctctccccgattacggggtgtcttggatcagaca |
| | | gccaccggggaagggtctggaatggattggagtgatttggggctctgagactactt |
| | | actacaactcatccctcaagtcacgcgtcaccatctcaaaggacaactctaagaat |
| | | caggtgtcactgaaactgtcatctgtgaccgcagccgacaccgccgtgtactattg |
| | | cgctaagcattactattatggcgggagctacgcaatggattactggggacagggta |
| | | ctctggtcaccgtgtccagcaccactaccccagcaccgaggccacccaccccggct |
| | | cctaccatcgcctcccagcctctgtccctgcgtccggaggcatgtagacccgcagc |
| | | tggtggggccgtgcatacccggggtcttgacttcgcctgcgatatctacatttggg |
| | | cccctctggctggtacttgcggggtcctgctgctttcactcgtgatcactctttac |
| | | tgtaagcgcggtcggaagaagctgctgtacatctttaagcaacccttcatgaggcc |
| | | tgtgcagactactcaagaggaggacggctgttcatgccggttcccagaggaggagg |
| | | aaggcggctgcgaactgcgcgtgaaattcagccgcagcgcagatgctccagcctac |
| | | aagcaggggcagaaccagctctacaacgaactcaatcttggtcggagagaggagta |
| | | cgacgtgctggacaagcggagaggacgggacccagaaatgggcgggaagccgcgca |
| | | gaaagaatccccaagagggcctgtacaacgagctccaaaaggataagatggcagaa |
| | | gcctatagcgagattggtatgaaaggggaacgcagaagaggcaaaggccacgacgg |
| | | actgtaccagggactcagcaccgccaccaaggacacctatgacgctcttcacatgc |
| | | aggccctgccgcctcgg |
| 105975 | 102 | MALPVTALLLPLALLLHAARPEIVMTQSPATLSLSPGERATLSCRASQDISKYLNW |
| CAR 10 | | YQQKPGQAPRLLIYHTSRLHSGIPARFSGSGSGTDYTLTISSLQPEDFAVYFCQQG |
| Full-aa | | NTLPYTFGQGTKLEIKGGGGSGGGGSGGGGSGGGGSQVQLQESGPGLVKPSETLSL |
| | | TCTVSGVSLPDYGVSWIRQPPGKGLEWIGVIWGSETTYYNSSLKSRVTISKDNSKN |
| | | QVSLKLSSVTAADTAVYYCAKHYYYGGSYAMDYWGQGTLVTVSSTTTPAPRPPTPA |
| | | PTIASQPLSLRPEACRPAAGGAVHTRGLDFACDIYIWAPLAGTCGVLLLSLVITLY |
| | | CKRGRKKLLYIFKQPFMRPVQTTQEEDGCSCRFPEEEEGGCELRVKFSRSADAPAY |
| | | KQGQNQLYNELNLGRREEYDVLDKRRGRDPEMGGKPRRKNPQEGLYNELQKDKMAE |
| | | AYSEIGMKGERRRGKGHDGLYQGLSTATKDTYDALHMQALPPR |

CAR11

| | | |
|---|---|---|
| CAR11 | 55 | eivmtqspatlslspgeratlscrasqdiskylnwyqqkpgqaprlliyhtsrlhs |
| scFv | | giparfsgsgsgtdytltisslqpedfavyfcqqgntlpytfgqgtkleikggggs |
| domain | | ggggsggggsqvqlqesgpglvkpsetlsltctvsgvslpdygvswirqppgkgle |
| | | wigviwgsettyynsslksrvtiskdnsknqvslklssvtaadtavyycakhyyyg |
| | | gsyamdywgqgtlvtvss |
| 103101 | 67 | Atggccctccctgtcaccgccctgctgcttccgctggctcttctgctccacgccgc |
| CAR11- | | tcggcccgaaattgtgatgacccagtcacccgccactcttagcctttcacccggtg |
| Soluble | | agcgcgcaaccctgtcttgcagagcctcccaagacatctcaaaataccttaattgg |
| scFv-nt | | tatcaacagaagcccggacaggctcctcgccttctgatctaccacaccagccggct |
| | | ccattctggaatccctgccaggttcagcggtagcggatctgggaccgactacaccc |
| | | tcactatcagctcactgcagccagaggacttcgctgtctatttctgtcagcaaggg |
| | | aacaccctgccctacacctttggacagggcaccaagctcgagattaaaggtggagg |
| | | tggcagcggaggaggtgggtccggcggtggaggaagccaggtccaactccaagaaa |
| | | gcggaccgggtcttgtgaagccatcagaaactctttcactgacttgtactgtgagc |
| | | ggagtgtctctccccgattacggggtgtcttggatcagacagccaccggggaaggg |
| | | tctggaatggattggagtgatttggggctctgagactacttactacaattcatccc |
| | | tcaagtcacgcgtcaccatctcaaaggacaactctaagaatcaggtgtcactgaaa |
| | | ctgtcatctgtgaccgcagccgacaccgccgtgtactattgcgctaagcattacta |
| | | ttatggcgggagctacgcaatggattactggggacagggtactctggtcaccgtgt |
| | | ccagccaccaccatcatcaccatcaccat |
| 103101 | 79 | MALPVTALLLPLALLLHAARPeivmtqspatlslspgeratlscrasqdiskylnw |
| CAR11- | | yqqkpgqaprlliyhtsrlhsgiparfsgsgsgtdytltisslqpedfavyfcqqg |
| Soluble | | ntlpytfgqgtkleikggggsggggsggggsqvqlqesgpglvkpsetlsltctvs |
| scFv-aa | | gvslpdygvswirqppgkglewigviwgsettyynsslksrvtiskdnsknqvslk |
| | | lssvtaadtavyycakhyyyggsyamdywgqgtivtvsshhhhhhhh |
| 105976 | 91 | atggctctgcccgtgaccgcactcctcctgccactggctctgctgcttcacgccgc |
| CAR 11 | | tcgcccacaagtccagcttcaagaatcagggcctggtctggtgaagccatctgaga |
| Full-nt | | ctctgtccctcacttgcaccgtgagcggagtgtccctcccagactacggagtgagc |
| | | tggattagacagcctcccggaaagggactggagtggatcggagtgatttggggtag |
| | | cgaaaccacttactataactcttccctgaagtcacgggtcaccatttcaaaggata |
| | | actcaaagaatcaagtgagcctcaagctctcatcagtcaccgccgctgacaccgcc |
| | | gtgtattactgtgccaagcattactactatggagggtcctacgccatggactactg |
| | | gggccagggaactctggtcactgtgtcatctggtggaggaggtagcggaggaggcg |
| | | ggagcggtggaggtggctccggaggtggcggaagcgaaatcgtgatgacccagagc |
| | | cctgcaaccctgtccctttctcccggggaacgggctaccctttcttgtcgggcatc |
| | | acaagatatctcaaaatacctcaattggtatcaacagaagccgggacaggccccta |
| | | ggcttcttatctaccacacctctcgcctgcatagcgggattcccgcacgctttagc |
| | | gggtctggaagcgggaccgactacactctgaccatctcatctctccagcccgagga |
| | | cttcgccgtctacttctgccagcagggtaacaccctgccgtacaccttcggccagg |
| | | gcaccaagcttgagatcaaaaccactactcccgctccaaggccacccacccctgcc |
| | | ccgaccatcgcctctcagccgctttccctgcgtccggaggcatgtagacccgcagc |
| | | tggtggggccgtgcatacccggggtcttgacttcgcctgcgatatctacatttggg |
| | | cccctctggctggtacttgcggggtcctgctgctttcactcgtgatcactctttac |
| | | tgtaagcgcggtcggaagaagctgctgtacatctttaagcaacccttcatgaggcc |
| | | tgtgcagactactcaagaggaggacggctgttcatgccggttcccagaggaggagg |
| | | aaggcggctgcgaactgcgcgtgaaattcagccgcagcgcagatgctccagcctac |
| | | aagcaggggcagaaccagctctacaacgaactcaatcttggtcggagagaggagta |
| | | cgacgtgctggacaagcggagaggacgggacccagaaatgggcgggaagccgcgca |
| | | gaaagaatccccaagagggcctgtacaacgagctccaaaaggataagatggcagaa |
| | | gcctatagcgagattggtatgaaaggggaacgcagaagaggcaaaggccacgacgg |
| | | actgtaccagggactcagcaccgccaccaaggacacctatgacgctcttcacatgc |
| | | aggccctgccgcctcgg |
| 105976 | 103 | MALPVTALLLPLALLLHAARPQVQLQESGPGLVKPSETLSLTCTVSGVSLPDYGVS |
| CAR 11 | | WIRQPPGKGLEWIGVIWGSETTYYNSSLKSRVTISKDNSKNQVSLKLSSVTAADTA |
| Full-aa | | VYYCAKHYYYGGSYAMDYWGQGTLVTVSSGGGGSGGGGSGGGGSGGGGSEIVMTQS |
| | | PATLSLSPGERATLSCRASQDISKYLNWYQQKPGQAPRLLIYHTSRLHSGIPARFS |
| | | GSGSGTDYTLTISSLQPEDFAVYFCQQGNTLPYTFGQGTKLEIKTTTPAPRPPTPA |
| | | PTIASQPLSLRPEACRPAAGGAVHTRGLDFACDIYIWAPLAGTCGVLLLSLVITLY |
| | | CKRGRKKLLYIFKQPFMRPVQTTQEEDGCSCRFPEEEEGGCELRVKFSRSADAPAY |
| | | KQGQNQLYNELNLGRREEYDVLDKRRGRDPEMGGKPRRKNPQEGLYNELQKDKMAE |
| | | AYSEIGMKGERRRGKGHDGLYQGLSTATKDTYDALHMQALPPR |

CAR12

| | | |
|---|---|---|
| CAR12 | 56 | qvqlqesgpglvkpsetlsltctvsgvslpdygvswirqppgkglewigviwgset |
| scFv | | tyynsslksrvtiskdnsknqvslklssvtaadtavyycakhyyyggsyamdywgq |
| domain | | gtivtvssggggsggggsggggseivmtqspatlslspgeratlscrasqdiskyl |
| | | nwyqqkpgqaprlliyhtsrlhsgiparfsgsgsgtdytltisslqpedfavyfcq |
| | | qgntlpytfgqgtkleik |
| 103104 | 68 | atggctctgcccgtgaccgcactcctcctgccactggctctgctgcttcacgccgc |
| CAR12- | | tcgcccacaagtccagcttcaagaatcagggcctggtctggtgaagccatctgaga |
| Soluble | | ctctgtccctcacttgcaccgtgagcggagtgtccctcccagactacggagtgagc |
| scFv-nt | | tggattagacagcctcccggaaagggactggagtggatcggagtgatttggggtag |
| | | cgaaaccacttactataactcttccctgaagtcacgggtcaccatttcaaaggata |
| | | actcaaagaatcaagtgagcctcaagctctcatcagtcaccgccgctgacaccgcc |
| | | gtgtattactgtgccaagcattactactatggagggtcctacgccatggactactg |
| | | gggccagggaactctggtcactgtgtcatctggtggaggaggtagcggaggaggcg |
| | | ggagcggtggaggtggctccgaaatcgtgatgacccagagccctgcaaccctgtcc |
| | | ctttctcccggggaacgggctaccctttcttgtcgggcatcacaagatatctcaaa |
| | | atacctcaattggtatcaacagaagccgggacaggcccctaggcttcttatctacc |
| | | acacctctcgcctgcatagcgggattcccgcacgctttagcgggtctggaagcggg |
| | | accgactacactctgaccatctcatctctccagcccgaggacttcgccgtctactt |
| | | ctgccagcagggtaacaccctgccgtacaccttcggccagggcaccaagcttgaga |
| | | tcaaacatcaccaccatcatcaccatcac |
| 103104 | 80 | MALPVTALLLPLALLLHAARPqvqlqesgpglvkpsetlsltctvsgvslpdygys |
| CAR12- | | wirqppgkglewigviwgsettyynsslksrvtiskdnsknqvslklssvtaadta |
| Soluble | | vyycakhyyyggsyamdywgqgtivtvssggggsggggsggggseivmtqspatls |
| seFv-aa | | lspgeratlscrasqdiskylnwyqqkpgqaprlliyhtsrlhsgiparfsgsgsg |
| | | tdytltisslqpedfavyfcqqgntlpytfgqgtkleikhhhhhhhh |
| 105977 | 92 | atggccctccctgtcaccgccctgctgcttccgctggctcttctgctccacgccgc |
| CAR12- | | tcggcccgaaattgtgatgacccagtcacccgccactcttagcctttcacccggtg |
| Full-nt | | agcgcgcaaccctgtcttgcagagcctcccaagacatctcaaaataccttaattgg |
| | | tatcaacagaagcccggacaggctcctcgccttctgatctaccacaccagccggct |
| | | ccattctggaatccctgccaggttcagcggtagcggatctgggaccgactacaccc |
| | | tcactatcagctcactgcagccagaggacttcgctgtctatttctgtcagcaaggg |
| | | aacaccctgccctacacctttggacagggcaccaagctcgagattaaaggtggagg |
| | | tggcagcggaggaggtgggtccggcggtggaggaagccaggtccaactccaagaaa |
| | | gcggaccgggtcttgtgaagccatcagaaactctttcactgacttgtactgtgagc |
| | | ggagtgtctctccccgattacggggtgtcttggatcagacagccaccggggaaggg |
| | | tctggaatggattggagtgatttggggctctgagactacttactacaactcatccc |
| | | tcaagtcacgcgtcaccatctcaaaggacaactctaagaatcaggtgtcactgaaa |
| | | ctgtcatctgtgaccgcagccgacaccgccgtgtactattgcgctaagcattacta |
| | | ttatggcgggagctacgcaatggattactggggacagggtactctggtcaccgtgt |
| | | ccagcaccactaccccagcaccgaggccacccaccccggctcctaccatcgcctcc |
| | | cagcctctgtccctgcgtccggaggcatgtagacccgcagctggtggggccgtgca |
| | | tacccggggtcttgacttcgcctgcgatatctacatttgggcccctctggctggta |
| | | cttgcggggtcctgctgctttcactcgtgatcactctttactgtaagcgcggtcgg |
| | | aagaagctgctgtacatctttaagcaacccttcatgaggcctgtgcagactactca |
| | | agaggaggacggctgttcatgccggttcccagaggaggaggaaggcggctgcgaac |
| | | tgcgcgtgaaattcagccgcagcgcagatgctccagcctacaagcaggggcagaac |
| | | cagctctacaacgaactcaatcttggtcggagagaggagtacgacgtgctggacaa |
| | | gcggagaggacgggacccagaaatgggcgggaagccgcgcagaaagaatccccaag |
| | | agggcctgtacaacgagctccaaaaggataagatggcagaagcctatagcgagatt |
| | | ggtatgaaaggggaacgcagaagaggcaaaggccacgacggactgtaccagggact |
| | | cagcaccgccaccaaggacacctatgacgctcttcacatgcaggccctgccgcctc |
| | | gg |
| 105977 | 104 | MALPVTALLLPLALLLHAARPEIVMTQSPATLSLSPGERATLSCRASQDISKYLNW |
| CAR12- | | YQQKPGQAPRLLIYHTSRLHSGIPARFSGSGSGTDYTLTISSLQPEDFAVYFCQQG |
| Full-aa | | NTLPYTFGQGTKLEIKGGGGSGGGGSGGGGSQVQLQESGPGLVKPSETLSLTCTVS |
| | | GVSLPDYGVSWIRQPPGKGLEWIGVIWGSETTYYNSSLKSRVTISKDNSKNQVSLK |
| | | LSSVTAADTAVYYCAKHYYYGGSYAMDYWGQGTLVTVSSTTTPAPRPPTPAPTIAS |
| | | QPLSLRPEACRPAAGGAVHTRGLDFACDIYIWAPLAGTCGVLLLSLVITLYCKRGR |
| | | KKLLYIFKQPFMRPVQTTQEEDGCSCRFPEEEEGGCELRVKFSRSADAPAYKQGQN |
| | | QLYNELNLGRREEYDVLDKRRGRDPEMGGKPRRKNPQEGLYNELQKDKMAEAYSEI |
| | | GMKGERRRGKGHDGLYQGLSTATKDTYDALHMQALPPR |

For all soluble scFv amino acid sequences, an optional signal sequence is shown in bold and underline; and the histidine tag is underlined.
For all CAR amino acid sequences, the relative location of the CDRs is underlined and bold.

TABLE 3
Murine CD19 CAR Constructs

| | SEQ ID | |
|---|---|---|
| CTL019 | NO: | |
| CTL019- | 105 | Atggccctgcccgtcaccgctctgctgctgccccttgctctgcttcttcatgcag |
| Soluble | | caaggccggacatccagatgacccaaaccacctcatccctctctgcctctcttgg |
| scFv- | | agacagggtgaccatttcttgtcgcgccagccaggacatcagcaagtatctgaac |
| Histag - nt | | tggtatcagcagaagccggacggaaccgtgaagctcctgatctaccatacctctc |
| | | gcctgcatagcggcgtgccctcacgcttctctggaagcggatcaggaaccgatta |
| | | ttctctcactatttcaaatcttgagcaggaagatattgccacctatttctgccag |
| | | cagggtaataccctgccctacaccttcggaggagggaccaagctcgaaatcaccg |
| | | gtggaggaggcagcggcggtggagggtctggtggaggtggttctgaggtgaagct |
| | | gcaagaatcaggccctggacttgtggccccttcacagtccctgagcgtgacttgc |
| | | accgtgtccggagtctccctgcccgactacggagtgtcatggatcagacaacctc |
| | | cacggaaaggactggaatggctcggtgtcatctggggtagcgaaactacttacta |
| | | caattcagccctcaaaagcaggctgactattatcaaggacaacagcaagtcccaa |
| | | gtctttcttaagatgaactcactccagactgacgacaccgcaatctactattgtg |
| | | ctaagcactactactacggaggatcctacgctatggattactggggacaaggtac |
| | | ttccgtcactgtctcttcacaccatcatcaccatcaccatcac |
| CTL019- | 106 | MALPVTALLLPLALLLHAARPdiqmtqttsslsaslgdrvtiscrasqdiskyln |
| Soluble | | wyqqkpdgtvklliyhtsrlhsgvpsrfsgsgsgtdysltisnleqediatyfcq |
| scFv- | | qgntlpytfgggtkleitggggsggggsggggsevklqesgpglvapsqslsvtc |
| Histag - aa | | tvsgvslpdygyswirqpprkglewlgviwgsettyynsalksrltiikdnsksq |
| | | vflkmnslqtddtaiyycakhyyyggsyamdywgqgtsvtvsshhhhhhhh |
| CTL019 | 107 | atggccttaccagtgaccgccttgctcctgccgctggccttgctgctccacgccg |
| Full - nt | | ccaggccggacatccagatgacacagactacatcctccctgtctgcctctctggg |
| | | agacagagtcaccatcagttgcagggcaagtcaggacattagtaaatatttaaat |
| | | tggtatcagcagaaaccagatggaactgttaaactcctgatctaccatacatcaa |
| | | gattacactcaggagtcccatcaaggttcagtggcagtgggtctggaacagatta |
| | | ttctctcaccattagcaacctggagcaagaagatattgccacttacttttgccaa |
| | | cagggtaatacgcttccgtacacgttcggaggggggaccaagctggagatcacag |
| | | gtggcggtggctcgggcggtggtgggtcgggtggcggcggatctgaggtgaaact |
| | | gcaggagtcaggacctggcctggtggcgccctcacagagcctgtccgtcacatgc |
| | | actgtctcaggggtctcattacccgactatggtgtaagctggattcgccagcctc |
| | | cacgaaagggtctggagtggctgggagtaatatggggtagtgaaaccacatacta |
| | | taattcagctctcaaatccagactgaccatcatcaaggacaactccaagagccaa |
| | | gttttcttaaaaatgaacagtctgcaaactgatgacacagccatttactactgtg |
| | | ccaaacattattactacggtggtagctatgctatggactactggggccaaggaac |
| | | ctcagtcaccgtctcctcaaccacgacgccagcgccgcgaccaccaacaccggcg |
| | | cccaccatcgcgtcgcagcccctgtccctgcgcccagaggcgtgccggccagcgg |
| | | cggggggcgcagtgcacacgagggggctggacttcgcctgtgatatctacatctg |
| | | ggcgcccttggccgggacttgtggggtccttctcctgtcactggttatcaccctt |
| | | tactgcaaacggggcagaaagaaactcctgtatatattcaaacaaccatttatga |
| | | gaccagtacaaactactcaagaggaagatggctgtagctgccgatttccagaaga |
| | | agaagaaggaggatgtgaactgagagtgaagttcagcaggagcgcagacgccccc |
| | | gcgtacaagcagggccagaaccagctctataacgagctcaatctaggacgaagag |
| | | aggagtacgatgttttggacaagagacgtggccgggaccctgagatggggggaaa |
| | | gccgagaaggaagaaccctcaggaaggcctgtacaatgaactgcagaaagataag |
| | | atggcggaggcctacagtgagattgggatgaaaggcgagcgccggaggggcaagg |
| | | ggcacgatggcctttaccagggtctcagtacagccaccaaggacacctacgacgc |
| | | ccttcacatgcaggccctgccccctcgc |
| CTL019 | 108 | MALPVTALLLPLALLLHAARPdiqmtqttsslsaslgdrvtiscrasqdiskyln |
| Full - aa | | wyqqkpdgtvklliyhtsrlhsgvpsrfsgsgsgtdysltisnleqediatyfcq |
| | | qgntlpytfgggtkleitggggsggggsggggsevklqesgpglvapsqslsvtc |
| | | tvsgvslpdygvswirqpprkglewlgviwgsettyynsalksrltiikdnsksq |
| | | vflkmnslqtddtaiyycakhyyyggsyamdywgqgtsvtvsstttpaprpptpa |
| | | ptiasqplslrpeacrpaaggavhtrgldfacdiyiwaplagtcgvlllslvitl |
| | | yckrgrkkllyifkqpfmrpvqttqeedgcscrfpeeeeggcelrvkfsrsadap |
| | | aykqgqnqlynelnlgrreeydvldkrrgrdpemggkprrknpqeglynelqkdk |
| | | [sequence omitted] |
| CTL019 | 109 | Diqmtqttsslsaslgdrvtiscrasqdiskylnwyqqkpdgtvklliyhtsrlh |
| scFv | | sgvpsrfsgsgsgtdysltisnleqediatyfcqqgntlpytfgggtkleitggg |
| domain | | gsggggsggggsevklqesgpglvapsqslsvtctvsgvslpdygvswirqpprk |
| | | glewlgviwgsettyynsalksrltiikdnsksqvflkmnslqtddtaiyycakh |
| | | yyyggsyamdywgqgtsvtvss |
| mCAR1 | 110 | QVQLLESGAELVRPGSSVKISCKASGYAFSSYWMNWVKQRPGQGLEWIGQIYPGD |
| scFv | | GDTNYNGKFKGQATLTADKSSSTAYMQLSGLTSEDSAVYSCARKTISSVVDFYFD |
| | | YWGQGTTVTGGGSGGGSGGGSGGGSELVLTQSPKFMSTSVGDRVSVTCKASQNVG |
| | | TNVAWYQQKPGQSPKPLIYSATYRNSGVPDRFTGSGSGTDFTLTITNVQSKDLAD |
| | | YFCQYNRYPYTSFFFTKLEIKRRS |
| mCAR1 | 111 | QVQLLESGAELVRPGSSVKISCKASGYAFSSYWMNWVKQRPGQGLEWIGQIYPGD |
| Full - aa | | GDTNYNGKFKGQATLTADKSSSTAYMQLSGLTSEDSAVYSCARKTISSVVDFYFD |
| | | YWGQGTTVTGGGSGGGSGGGSGGGSELVLTQSPKFMSTSVGDRVSVTCKASQNVG |
| | | TNVAWYQQKPGQSPKPLIYSATYRNSGVPDRFTGSGSGTDFTLTITNVQSKDLAD |
| | | YFCQYNRYPYTSFFFTKLEIKRRSKIEVMYPPPYLDNEKSNGTIIHVKGKHLCPS |
| | | PLFPGPSKPFWVLVVVGGVLACYSLLVTVAFIIFWVRSKRSRLLHSDYMNMTPRR |
| | | PGPTRKHYQPYAPPRDFAAYRSRVKFSRSADAPAYQQGQNQLYNELNLGRREEYD |
| | | VLDKRRGRDPEMGGKPRRKNPQEGLYNELQKDKMAEAYSEIGMKGERRRGKGHDG |
| | | LYQGLSTATKDTYDALHMQALPPR |
| mCAR2 | 112 | DIQMTQTTSSLSASLGDRVTISCRASQDISKYLNWYQQKPDGTVKLLIYHTSRLH |
| scFv | | SGVPSRFSGSGSGTDYSLTISNLEQEDIATYFCQQGNTLPYTFGGGTKLEITGST |
| | | SGSGKPGSGEGSTKGEVKLQESGPGLVAPSQSLSVTCTVSGVSLPDYGVSWIRQP |
| | | PRKGLEWLGVIWGSETTYYNSALKSRLTIIKDNSKSQVFLKMNSLQTDDTAIYYC |
| | | AKHYYYGGSYAMDYWGQGTSVTVSSE |
| mCAR2 | 113 | DIQMTQTTSSLSASLGDRVTISCRASQDISKYLNWYQQKPDGTVKLLIYHTSRLH |
| CAR- aa | | SGVPSRFSGSGSGTDYSLTISNLEQEDIATYFCQQGNTLPYTFGGGTKLEITGST |
| | | SGSGKPGSGEGSTKGEVKLQESGPGLVAPSQSLSVTCTVSGVSLPDYGVSWIRQP |
| | | PRKGLEWLGVIWGSETTYYNSALKSRLTIIKDNSKSQVFLKMNSLQTDDTAIY |
| | | YCAKHYYYGGSYAMDYWGQGTSVTVSSESKYGPPCPPCPMFWVLVVVGGVLACYS |
| | | LLVTVAFIIFWVKRGRKKLLYIFKQPFMRPVQTTQEEDGCSCRFEEEEGGCELRV |
| | | KFSRSADAPAYQQGQNQLYNELNLGRREEYDVLDKRRGRDPEMGGKPRRKNPQEG |
| | | LYNELQKDKMAEAYSEIGMKGERRRGKGHDGLYQGLSTATKDTYDALHMQALPPR |
| | | L |
| mCAR2 | 114 | DIQMTQTT SSLSASLGDR VTISCRASQD ISKYLNWYQQ KPDGTVKLLI |
| Full - aa | | YHTSRLHSGV PSRFSGSGSG TDYSLTISNL EQEDIATYFC QQGNTLPYTF |
| | | GGGTKLEITG STSGSGKPGS GEGSTKGEVK LQESGPGLVA PSQSLSVTCT |
| | | VSGVSLPDYG VSWIRQPPRK GLEWLGVIWG SETTYYNSAL KSRLTIIKDN |
| | | SKSQVFLKMN SLQTDDTAIY YCAKHYYYGG SYAMDYWGQG TSVTVSSESK |
| | | YGPPCPPCPM FWVLVVVGGV LACYSLLVTV |
| | | AFIIFWVKRG RKKLLYIFKQ PFMRPVQTTQ EEDGCSCRFE EEEGGCELRV |
| | | KFSRSADAPA YQQGQNQLYN ELNLGRREEY DVLDKRRGRD PEMGGKPRRK |
| | | NPQEGLYNEL QKDKMAEAYS EIGMKGERRR GKGHDGLYQG LSTATKDTYD |
| | | ALHMQALPPR LEGGGEGRGS LLTCGDVEEN PGPRMLLLVT SLLLCELPHP |
| | | AFLLIPRKVC NGIGIGEFKD SLSINATNIK HFKNCTSISG DLHILPVAFR |
| | | GDSFTHTPPL DPQELDILKT VKEITGFLLI QAWPENRTDL HAFENLEIIR |
| | | GRTKQHGQFS LAVVSLNITS LGLRSLKEIS DGDVIISGNK NLCYANTINW |
| | | KKLFGTSGQK TKIISNRGEN SCKATGQVCH ALCSPEGCWG PEPRDCVSCR |
| | | NVSRGRECVD KCNLLEGEPR EFVENSECIQ CHPECLPQAM NITCTGRGPD |
| | | NCIQCAHYID GPHCVKTCPA GVMGENNTLV WKYADAGHVC HLCHPNCTYG |
| | | CTGPGLEGCP TNGPKIPSIA TGMVGALLLL LVVALGIGLF M |
| mCAR3 | 115 | DIQMTQTTSSLSASLGDRVTISCRASQDISKYLNWYQQKPDGTVKLLIYHTSRLH |
| scFv | | SGVPSRFSGSGSGTDYSLTISNLEQEDIATYFCQQGNTLPYTFGGGTKLEITGST |
| | | SGSGKPGSGEGSTKGEVKLQESGPGLVAPSQSLSVTCTVSGVSLPDYGVSWIRQP |
| | | PRKGLEWLGVIWGSETTYYNSALKSRLTIIKDNSKSQVFLKMNSLQTDDTAIYYC |
| | | AKHYYYGGSYAMDYWGQGTSVTVSS |
| mCAR3 | 116 | DIQMTQTTSSLSASLGDRVTISCRASQDISKYLNWYQQKPDGTVKLLIYHTSRLH |
| Full - aa | | SGVPSRFSGSGSGTDYSLTISNLEQEDIATYFCQQGNTLPYTFGGGTKLEITGST |
| | | SGSGKPGSGEGSTKGEVKLQESGPGLVAPSQSLSVTCTVSGVSLPDYGVSWIRQP |
| | | PRKGLEWLGVIWGSETTYYNSALKSRLTIIKDNSKSQVFLKMNSLQTDDTAIYYC |
| | | AKHYYYGGSYAMDYWGQGTSVTVSSAAAIEVMYPPPYLDNEKSNGTIIHVKGKHL |
| | | CPSPLFPGPSKPFWVLVVVGGVLACYSLLVTVAFIIFWVRSKRSRLLHSDYMNMT |
| | | PRRPGPTRKHYQPYAPPRDFAAYRSRVKFSRSADAPAYQQGQNQLYNELNLGRRE |
| | | EYDVLDKRRGRDPEMGGKPRRKNPQEGLYNELQKDKMAEAYSEIGMKGERRRGKG |
| | | HDGLYQGLSTATKDTYDALHMQALPPR |
| SSJ25-C1 | 287 | QVQLLESGAELVRPGSSVKISCKASGYAFSSYWMNWVKQRPGQGLEWIGQIYPGD |
| VH | | GDTNYNGKFKGQATLTADKSSSTAYMQLSGLTSEDSAVYSCARKTISSVVDFYFD |
| sequence | | YWGQGTTVT |
| SSJ25-C1 | 288 | ELVLTQSPKFMSTSVGDRVSVTCKASQNVGTNVAWYQQKPGQSPKPLIYSATYRN |
| VL | | SGVPDRFTGSGSGTDFTLTITNVQSKDLADYFYFCQYNRYPYTSGGGTKLEIKRR |
| sequence | | S |

For all soluble scFv amino acid sequences, an optional signal sequence is shown in bold and underline; and the histidine tag is underlined.

[0400] In some embodiments, the antigen binding domain comprises a HC CDR1, a HC CDR2, and a HC CDR3 of any heavy chain binding domain amino acid sequences listed in Table 2 or 3. In embodiments, the antigen binding domain further comprises a LC CDR1, a LC CDR2, and a LC CDR3. In embodiments, the antigen binding domain comprises a LC CDR1, a LC CDR2, and a LC CDR3 of any light chain binding domain amino acid sequences listed in Table 2 or 3.

[0401] In some embodiments, the antigen binding domain comprises one, two or all of LC CDR1, LC CDR2, and LC CDR3 of any light chain binding domain amino acid sequences listed in Table 2 or 3, and one, two or all of HC CDR1, HC CDR2, and HC CDR3 of any heavy chain binding domain amino acid sequences listed in Table 2 or 3.

[0402] In some embodiments, the CDRs are defined according to the Kabat numbering scheme, the Chothia numbering scheme, or a combination thereof.

[0403] The sequences of humanized CDR sequences of the scFv domains are shown in Table 4 for the heavy chain variable domains and in Table 5 for the light chain variable domains. “ID” stands for the respective SEQ ID NO for each CDR.

TABLE 4
Heavy Chain Variable Domain CDRs (Kabat)

| | | | SEQ | | SEQ | | SEQ |
|---|---|---|---|---|---|---|---|
| | | | ID | | ID | | ID |
| Candidate | FW | HCDR1 | NO: | HCDR2 | NO: | HCDR3 | NO: |
| murine_CART19 | | DYGVS | 117 | VIWGSETTYYNSALKS | 118 | HYYYGGSYAMDY | 122 |
| humanized_CART19 | VH4 | DYGVS | 117 | VIWGSETTYY [symbol] S [symbol] LKS | 119 | HYYYGGSYAMDY | 122 |
| a | | | | | | | |
| humanized_CART19 | VH4 | DYGVS | 117 | VIWGSETTYY [symbol] S [symbol] LKS | 120 | HYYYGGSYAMDY | 122 |
| b | | | | | | | |
| humanized_CART19 | VH4 | DYGVS | 117 | VIWGSETTYYNS [symbol] LKS | 121 | HYYYGGSYAMDY | 122 |
| c | | | | | | | |

TABLE 5
Light Chain Variable Domain CDRs (Kabat)

| | | | SEQ | | SEQ | | SEQ |
|---|---|---|---|---|---|---|---|
| | | | ID | | ID | | ID |
| Candidate | FW | LCDR1 | NO: | LCDR2 | NO: | LCDR3 | NO: |
| murine_CART19 | | RASQDISKYLN | 123 | HTSRLHS | 124 | QQGNTLPYT | 125 |
| humanized_CART19 a | VK3 | RASQDISKYLN | 123 | HTSRLHS | 124 | QQGNTLPYT | 125 |
| humanized_CART19 b | VK3 | RASQDISKYLN | 123 | HTSRLHS | 124 | QQGNTLPYT | 125 |
| humanized_CART19 c | VK3 | RASQDISKYLN | 123 | HTSRLHS | 124 | QQGNTLPYT | 125 |

[0404] The CAR scFv fragments were then cloned into lentiviral vectors to create a full length CAR construct in a single coding frame, and using the EF1 alpha promoter for expression (SEQ ID NO: 11).

[0405] In some embodiments, the CD19 CAR comprises an antigen binding domain derived from (e.g., comprises an amino acid sequence of) an anti-CD19 antibody (e.g., an anti-CD19 mono- or bispecific antibody) or a fragment or conjugate thereof. In one embodiment, the anti-CD19 antibody is a humanized antigen binding domain as described in WO2014/153270 (e.g., Table 3 of WO2014/153270) incorporated herein by reference, or a conjugate thereof. Other exemplary anti-CD19 antibodies or fragments or conjugates thereof, include but are not limited to, a bispecific T cell engager that targets CD19 (e.g., blinatumomab), SAR3419 (Sanofi), MEDI-551 (MedImmune LLC), Combotox, DT2219ARL (Masonic Cancer Center), MOR-208 (also called XmAb-5574; MorphoSys), XmAb-5871 (Xencor), MDX-1342 (Bristol-Myers Squibb), SGN-CD19A (Seattle Genetics), and AFM11 (Affimed Therapeutics). See, e.g., Hammer. MAbs. 4.5(2012): 571-77. Blinatomomab is a bispecific antibody comprised of two scFvs—one that binds to CD19 and one that binds to CD3. Blinatomomab directs T cells to attack cancer cells. See, e.g., Hammer et al.; Clinical Trial Identifier No. NCT00274742 and NCT01209286. MEDI-551 is a humanized anti-CD19 antibody with a Fc engineered to have enhanced antibody-dependent cell-mediated cytotoxicity (ADCC). See, e.g., Hammer et al.; and Clinical Trial Identifier No. NCT01957579. Combotox is a mixture of immunotoxins that bind to CD19 and CD22. The immunotoxins are made up of scFv antibody fragments fused to a deglycosylated ricin A chain. See, e.g., Hammer et al.; and Herrera et al. J. Pediatr. Hematol. Oncol. 31.12(2009):936-41; Schindler et al. Br. J. Haematol. 154.4(2011):471-6. DT2219ARL is a bispecific immunotoxin targeting CD19 and CD22, comprising two scFvs and a truncated diphtheria toxin. See, e.g., Hammer et al.; and Clinical Trial Identifier No. NCT00889408. SGN-CD19A is an antibody-drug conjugate (ADC) comprised of an anti-CD19 humanized monoclonal antibody linked to a synthetic cytotoxic cell-killing agent, monomethyl auristatin F (MMAF). See, e.g., Hammer et al.; and Clinical Trial Identifier Nos. NCT01786096 and NCT01786135. SAR3419 is an anti-CD19 antibody-drug conjugate (ADC) comprising an anti-CD19 humanized monoclonal antibody conjugated to a maytansine derivative via a cleavable linker. See, e.g., Younes et al. J. Clin. Oncol. 30.2(2012): 2776-82; Hammer et al.; Clinical Trial Identifier No. NCT00549185; and Blanc et al. Clin Cancer Res. 2011; 17:6448-58. XmAb-5871 is an Fc-engineered, humanized anti-CD19 antibody. See, e.g., Hammer et al. MDX-1342 is a human Fc-engineered anti-CD19 antibody with enhanced ADCC. See, e.g., Hammer et al. In embodiments, the antibody molecule is a bispecific anti-CD19 and anti-CD3 molecule. For instance, AFM11 is a bispecific antibody that targets CD19 and CD3. See, e.g., Hammer et al.; and Clinical Trial Identifier No. NCT02106091. In some embodiments, an anti-CD19 antibody described herein is conjugated or otherwise bound to a therapeutic agent, e.g., a chemotherapeutic agent, peptide vaccine (such as that described in Izumoto et al. 2008 J Neurosurg 108:963-971), immunosuppressive agent, or immunoablative agent, e.g., cyclosporin, azathioprine, methotrexate, mycophenolate, FK506, CAMPATH, anti-CD3 antibody, cytoxin, fludarabine, rapamycin, mycophenolic acid, steroid, FR901228, or cytokine.

[0406] In one embodiment, an antigen binding domain against CD19 is an antigen binding portion, e.g., CDRs, of an antigen binding domain described in a Table herein. In one embodiment, a CD19 antigen binding domain can be from any CD19 CAR, e.g., LG-740; U.S. Pat. No. 8,399,645; U.S. Pat. No. 7,446,190; Xu et al., Leuk Lymphoma. 2013 54(2):255-260(2012); Cruz et al., Blood 122(17):2965-2973 (2013); Brentjens et al., Blood, 118(18):4817-4828 (2011); Kochenderfer et al., Blood 116(20):4099-102 (2010); Kochenderfer et al., Blood 122 (25):4129-39(2013); and 16th Annu Meet Am Soc Gen Cell Ther (ASGCT) (May 15-18, Salt Lake City) 2013, Abst 10, each of which is herein incorporated by reference in its entirety.

### Exemplary BCMA Antigen Binding Domains and CAR Constructs

[0407] In embodiments the BCMA CAR comprises an anti-BCMA binding domain (e.g., human or humanized anti-BCMA binding domain), a transmembrane domain, and an intracellular signaling domain, and wherein said anti-BCMA binding domain comprises a heavy chain complementary determining region 1 (HC CDR1), a heavy chain complementary determining region 2 (HC CDR2), and a heavy chain complementary determining region 3 (HC CDR3) of any anti-BMCA heavy chain binding domain amino acid sequences listed in Table 7 or 8.

[0408] In one embodiment, the anti-BCMA binding domain comprises a light chain variable region described herein (e.g., in Table 7 or 8) and/or a heavy chain variable region described herein (e.g., in Table 7 or 8).

[0409] In one embodiment, the encoded anti-BCMA binding domain is a scFv comprising a light chain and a heavy chain of an amino acid sequence of Table 7 or 8.

[0410] In an embodiment, the human or humanized anti-BCMA binding domain (e.g., an scFv) comprises: a light chain variable region comprising an amino acid sequence having at least one, two or three modifications (e.g., substitutions, e.g., conservative substitutions) but not more than 30, 20 or 10 modifications (e.g., substitutions, e.g., conservative substitutions) of an amino acid sequence of a light chain variable region provided in Table 7 or 8, or a sequence with at least 95% (e.g., 95-99%) identity thereof; and/or a heavy chain variable region comprising an amino acid sequence having at least one, two or three modifications (e.g., substitutions, e.g., conservative substitutions) but not more than 30, 20 or 10 modifications (e.g., substitutions, e.g., conservative substitutions) of an amino acid sequence of a heavy chain variable region provided in Table 7 or 8, or a sequence with at least 95% (e.g., 95-99%) identity thereof.

TABLE 7
Amino Acid and Nucleic Acid Sequences of exemplary anti-BCMA scFv domains
and BCMA CAR molecules

| | | |
|---|---|---|
| | SEQ | |
| Name/ | ID | |
| Description | NO: | Sequence |

139109

| | | |
|---|---|---|
| 139109- aa | 294 | EVQLVESGGGLVQPGGSLRLSCAVSGFALSNHGMSWVRRAPGKGLEWV |
| ScFv | | SGIVYSGSTYYAASVKGRFTISRDNSRNTLYLQMNSLRPEDTAIYYCS |
| domain | | AHGGESDVWGQGTTVTVSSASGGGGSGGRASGGGGSDIQLTQSPSSLS |
| | | ASVGDRVTITCRASQSISSYLNWYQQKPGKAPKLLIYAASSLQSGVPS |
| | | RFSGSGSGTDFTLTISSLQPEDFATYYCQQSYSTPYTFGQGTKVEIK |
| 139109- nt | 295 | GAAGTGCAATTGGTGGAATCAGGGGGAGGACTTGTGCAGCCTGGAGGA |
| ScFv | | TCGCTGAGACTGTCATGTGCCGTGTCCGGCTTTGCCCTGTCCAACCAC |
| domain | | GGGATGTCCTGGGTCCGCCGCGCGCCTGGAAAGGGCCTCGAATGGGTG |
| | | TCGGGTATTGTGTACAGCGGTAGCACCTACTATGCCGCATCCGTGAAG |
| | | GGGAGATTCACCATCAGCCGGGACAACTCCAGGAACACTCTGTACCTC |
| | | CAAATGAATTCGCTGAGGCCAGAGGACACTGCCATCTACTACTGCTCC |
| | | GCGCATGGCGGAGAGTCCGACGTCTGGGGACAGGGGACCACCGTGACC |
| | | GTGTCTAGCGCGTCCGGCGGAGGCGGCAGCGGGGGTCGGGCATCAGGG |
| | | GGCGGCGGATCGGACATCCAGCTCACCCAGTCCCCGAGCTCGCTGTCC |
| | | GCCTCCGTGGGAGATCGGGTCACCATCACGTGCCGCGCCAGCCAGTCG |
| | | ATTTCCTCCTACCTGAACTGGTACCAACAGAAGCCCGGAAAAGCCCCG |
| | | AAGCTTCTCATCTACGCCGCCTCGAGCCTGCAGTCAGGAGTGCCCTCA |
| | | CGGTTCTCCGGCTCCGGTTCCGGTACTGATTTCACCCTGACCATTTCC |
| | | TCCCTGCAACCGGAGGACTTCGCTACTTACTACTGCCAGCAGTCGTAC |
| | | TCCACCCCCTACACTTTCGGACAAGGCACCAAGGTCGAAATCAAG |
| 139109- aa | 296 | EVQLVESGGGLVQPGGSLRLSCAVSGFALSNHGMSWVRRAPGKGLEWV |
| VH | | SGIVYSGSTYYAASVKGRFTISRDNSRNTLYLQMNSLRPEDTAIYYCS |
| | | AHGGESDVWGQGTTVTVSS |
| 139109- aa | 297 | DIQLTQSPSSLSASVGDRVTITCRASQSISSYLNWYQQKPGKAPKLLI |
| VL | | YAASSLQSGVPSRFSGSGSGTDFTLTISSLQPEDFATYYCQQSYSTPY |
| | | TFGQGTKVEIK |
| 139109- aa | 298 | MALPVTALLLPLALLLHAARPEVQLVESGGGLVQPGGSLRLSCAVSGF |
| Full CAR | | ALSNHGMSWVRRAPGKGLEWVSGIVYSGSTYYAASVKGRFTISRDNSR |
| | | NTLYLQMNSLRPEDTAIYYCSAHGGESDVWGQGTTVTVSSASGGGGSG |
| | | GRASGGGGSDIQLTQSPSSLSASVGDRVTITCRASQSISSYLNWYQQK |
| | | PGKAPKLLIYAASSLQSGVPSRFSGSGSGTDFTLTISSLQPEDFATYY |
| | | CQQSYSTPYTFGQGTKVEIKTTTPAPRPPTPAPTIASQPLSLRPEACR |
| | | PAAGGAVHTRGLDFACDIYIWAPLAGTCGVLLLSLVITLYCKRGRKKL |
| | | LYIFKQPFMRPVQTTQEEDGCSCRFPEEEEGGCELRVKFSRSADAPAY |
| | | KQGQNQLYNELNLGRREEYDVLDKRRGRDPEMGGKPRRKNPQEGLYNE |
| | | LQKDKMAEAYSEIGMKGERRRGKGHDGLYQGLSTATKDTYDALHMQAL |
| | | PPR |
| 139109- nt | 299 | ATGGCCCTCCCTGTCACCGCCCTGCTGCTTCCGCTGGCTCTTCTGCTC |
| Full CAR | | CACGCCGCTCGGCCCGAAGTGCAATTGGTGGAATCAGGGGGAGGACTT |
| | | GTGCAGCCTGGAGGATCGCTGAGACTGTCATGTGCCGTGTCCGGCTTT |
| | | GCCCTGTCCAACCACGGGATGTCCTGGGTCCGCCGCGCGCCTGGAAAG |
| | | GGCCTCGAATGGGTGTCGGGTATTGTGTACAGCGGTAGCACCTACTAT |
| | | GCCGCATCCGTGAAGGGGAGATTCACCATCAGCCGGGACAACTCCAGG |
| | | AACACTCTGTACCTCCAAATGAATTCGCTGAGGCCAGAGGACACTGCC |
| | | ATCTACTACTGCTCCGCGCATGGCGGAGAGTCCGACGTCTGGGGACAG |
| | | GGGACCACCGTGACCGTGTCTAGCGCGTCCGGCGGAGGCGGCAGCGGG |
| | | GGTCGGGCATCAGGGGGCGGCGGATCGGACATCCAGCTCACCCAGTCC |
| | | CCGAGCTCGCTGTCCGCCTCCGTGGGAGATCGGGTCACCATCACGTGC |
| | | CGCGCCAGCCAGTCGATTTCCTCCTACCTGAACTGGTACCAACAGAAG |
| | | CCCGGAAAAGCCCCGAAGCTTCTCATCTACGCCGCCTCGAGCCTGCAG |
| | | TCAGGAGTGCCCTCACGGTTCTCCGGCTCCGGTTCCGGTACTGATTTC |
| | | ACCCTGACCATTTCCTCCCTGCAACCGGAGGACTTCGCTACTTACTAC |
| | | TGCCAGCAGTCGTACTCCACCCCCTACACTTTCGGACAAGGCACCAAG |
| | | GTCGAAATCAAGACCACTACCCCAGCACCGAGGCCACCCACCCCGGCT |
| | | CCTACCATCGCCTCCCAGCCTCTGTCCCTGCGTCCGGAGGCATGTAGA |
| | | CCCGCAGCTGGTGGGGCCGTGCATACCCGGGGTCTTGACTTCGCCTGC |
| | | GATATCTACATTTGGGCCCCTCTGGCTGGTACTTGCGGGGTCCTGCTG |
| | | CTTTCACTCGTGATCACTCTTTACTGTAAGCGCGGTCGGAAGAAGCTG |
| | | CTGTACATCTTTAAGCAACCCTTCATGAGGCCTGTGCAGACTACTCAA |
| | | GAGGAGGACGGCTGTTCATGCCGGTTCCCAGAGGAGGAGGAAGGCGGC |
| | | TGCGAACTGCGCGTGAAATTCAGCCGCAGCGCAGATGCTCCAGCCTAC |
| | | AAGCAGGGGCAGAACCAGCTCTACAACGAACTCAATCTTGGTCGGAGA |
| | | GAGGAGTACGACGTGCTGGACAAGCGGAGAGGACGGGACCCAGAAATG |
| | | GGCGGGAAGCCGCGCAGAAAGAATCCCCAAGAGGGCCTGTACAACGAG |
| | | CTCCAAAAGGATAAGATGGCAGAAGCCTATAGCGAGATTGGTATGAAA |
| | | GGGGAACGCAGAAGAGGCAAAGGCCACGACGGACTGTACCAGGGACTC |
| | | AGCACCGCCACCAAGGACACCTATGACGCTCTTCACATGCAGGCCCTG |
| | | CCGCCTCGG |

139103

| | | |
|---|---|---|
| 139103- aa | 300 | QVQLVESGGGLVQPGRSLRLSCAASGFTFSNYAMSWVRQAPGKGLGWV |
| ScFv | | SGISRSGENTYYADSVKGRFTISRDNSKNTLYLQMNSLRDEDTAVYYC |
| domain | | ARSPAHYYGGMDVWGQGTTVTVSSASGGGGSGGRASGGGGSDIVLTQS |
| | | PGTLSLSPGERATLSCRASQSISSSFLAWYQQKPGQAPRLLIYGASRR |
| | | ATGIPDRFSGSGSGTDFTLTISRLEPEDSAVYYCQQYHSSPSWTFGQG |
| | | TKLEIK |
| 139103- nt | 301 | CAAGTGCAACTCGTGGAATCTGGTGGAGGACTCGTGCAACCCGGAAGA |
| ScFv | | TCGCTTAGACTGTCGTGTGCCGCCAGCGGGTTCACTTTCTCGAACTAC |
| domain | | GCGATGTCCTGGGTCCGCCAGGCACCCGGAAAGGGACTCGGTTGGGTG |
| | | TCCGGCATTTCCCGGTCCGGCGAAAATACCTACTACGCCGACTCCGTG |
| | | AAGGGCCGCTTCACCATCTCAAGGGACAACAGCAAAAACACCCTGTAC |
| | | TTGCAAATGAACTCCCTGCGGGATGAAGATACAGCCGTGTACTATTGC |
| | | GCCCGGTCGCCTGCCCATTACTACGGCGGAATGGACGTCTGGGGACAG |
| | | GGAACCACTGTGACTGTCAGCAGCGCGTCGGGTGGCGGCGGCTCAGGG |
| | | GGTCGGGCCTCCGGGGGGGGAGGGTCCGACATCGTGCTGACCCAGTCC |
| | | CCGGGAACCCTGAGCCTGAGCCCGGGAGAGCGCGCGACCCTGTCATGC |
| | | CGGGCATCCCAGAGCATTAGCTCCTCCTTTCTCGCCTGGTATCAGCAG |
| | | AAGCCCGGACAGGCCCCGAGGCTGCTGATCTACGGCGCTAGCAGAAGG |
| | | GCTACCGGAATCCCAGACCGGTTCTCCGGCTCCGGTTCCGGGACCGAT |
| | | TTCACCCTTACTATCTCGCGCCTGGAACCTGAGGACTCCGCCGTCTAC |
| | | TACTGCCAGCAGTACCACTCATCCCCGTCGTGGACGTTCGGACAGGGC |
| | | ACCAAGCTGGAGATTAAG |
| 139103- aa | 302 | QVQLVESGGGLVQPGRSLRLSCAASGFTFSNYAMSWVRQAPGKGLGWV |
| VH | | SGISRSGENTYYADSVKGRFTISRDNSKNTLYLQMNSLRDEDTAVYYC |
| | | ARSPAHYYGGMDVWGQGTTVTVSS |
| 139103- aa | 303 | DIVLTQSPGTLSLSPGERATLSCRASQSISSSFLAWYQQKPGQAPRLL |
| VL | | IYGASRRATGIPDRFSGSGSGTDFTLTISRLEPEDSAVYYCQQYHSSP |
| | | SWTFGQGTKLEIK |
| 139103- aa | 304 | MALPVTALLLPLALLLHAARPQVQLVESGGGLVQPGRSLRLSCAASGF |
| Full CAR | | TFSNYAMSWVRQAPGKGLGWVSGISRSGENTYYADSVKGRFTISRDNS |
| | | KNTLYLQMNSLRDEDTAVYYCARSPAHYYGGMDVWGQGTTVTVSSASG |
| | | GGGSGGRASGGGGSDIVLTQSPGTLSLSPGERATLSCRASQSISSSFL |
| | | AWYQQKPGQAPRLLIYGASRRATGIPDRFSGSGSGTDFTLTISRLEPE |
| | | DSAVYYCQQYHSSPSWTFGQGTKLEIKTTTPAPRPPTPAPTIASQPLS |
| | | LRPEACRPAAGGAVHTRGLDFACDIYIWAPLAGTCGVLLLSLVITLYC |
| | | KRGRKKLLYIFKQPFMRPVQTTQEEDGCSCRFPEEEEGGCELRVKFSR |
| | | SADAPAYKQGQNQLYNELNLGRREEYDVLDKRRGRDPEMGGKPRRKNP |
| | | QEGLYNELQKDKMAEAYSEIGMKGERRRGKGHDGLYQGLSTATKDTYD |
| | | ALHMQALPPR |
| 139103- nt | 305 | ATGGCCCTCCCTGTCACCGCCCTGCTGCTTCCGCTGGCTCTTCTGCTC |
| Full CAR | | CACGCCGCTCGGCCCCAAGTGCAACTCGTGGAATCTGGTGGAGGACTC |
| | | GTGCAACCCGGAAGATCGCTTAGACTGTCGTGTGCCGCCAGCGGGTTC |
| | | ACTTTCTCGAACTACGCGATGTCCTGGGTCCGCCAGGCACCCGGAAAG |
| | | GGACTCGGTTGGGTGTCCGGCATTTCCCGGTCCGGCGAAAATACCTAC |
| | | TACGCCGACTCCGTGAAGGGCCGCTTCACCATCTCAAGGGACAACAGC |
| | | AAAAACACCCTGTACTTGCAAATGAACTCCCTGCGGGATGAAGATACA |
| | | GCCGTGTACTATTGCGCCCGGTCGCCTGCCCATTACTACGGCGGAATG |
| | | GACGTCTGGGGACAGGGAACCACTGTGACTGTCAGCAGCGCGTCGGGT |
| | | GGCGGCGGCTCAGGGGGTCGGGCCTCCGGGGGGGGAGGGTCCGACATC |
| | | GTGCTGACCCAGTCCCCGGGAACCCTGAGCCTGAGCCCGGGAGAGCGC |
| | | GCGACCCTGTCATGCCGGGCATCCCAGAGCATTAGCTCCTCCTTTCTC |
| | | GCCTGGTATCAGCAGAAGCCCGGACAGGCCCCGAGGCTGCTGATCTAC |
| | | GGCGCTAGCAGAAGGGCTACCGGAATCCCAGACCGGTTCTCCGGCTCC |
| | | GGTTCCGGGACCGATTTCACCCTTACTATCTCGCGCCTGGAACCTGAG |
| | | GACTCCGCCGTCTACTACTGCCAGCAGTACCACTCATCCCCGTCGTGG |
| | | ACGTTCGGACAGGGCACCAAGCTGGAGATTAAGACCACTACCCCAGCA |
| | | CCGAGGCCACCCACCCCGGCTCCTACCATCGCCTCCCAGCCTCTGTCC |
| | | CTGCGTCCGGAGGCATGTAGACCCGCAGCTGGTGGGGCCGTGCATACC |
| | | CGGGGTCTTGACTTCGCCTGCGATATCTACATTTGGGCCCCTCTGGCT |
| | | GGTACTTGCGGGGTCCTGCTGCTTTCACTCGTGATCACTCTTTACTGT |
| | | AAGCGCGGTCGGAAGAAGCTGCTGTACATCTTTAAGCAACCCTTCATG |
| | | AGGCCTGTGCAGACTACTCAAGAGGAGGACGGCTGTTCATGCCGGTTC |
| | | CCAGAGGAGGAGGAAGGCGGCTGCGAACTGCGCGTGAAATTCAGCCGC |
| | | AGCGCAGATGCTCCAGCCTACAAGCAGGGGCAGAACCAGCTCTACAAC |
| | | GAACTCAATCTTGGTCGGAGAGAGGAGTACGACGTGCTGGACAAGCGG |
| | | AGAGGACGGGACCCAGAAATGGGCGGGAAGCCGCGCAGAAAGAATCCC |
| | | CAAGAGGGCCTGTACAACGAGCTCCAAAAGGATAAGATGGCAGAAGCC |
| | | TATAGCGAGATTGGTATGAAAGGGGAACGCAGAAGAGGCAAAGGCCAC |
| | | GACGGACTGTACCAGGGACTCAGCACCGCCACCAAGGACACCTATGAC |
| | | GCTCTTCACATGCAGGCCCTGCCGCCTCGG |

139105

| | | |
|---|---|---|
| 139105- aa | 306 | QVQLVESGGGLVQPGRSLRLSCAASGFTFDDYAMHWVRQAPGKGLEWV |
| ScFv | | SGISWNSGSIGYADSVKGRFTISRDNAKNSLYLQMNSLRAEDTALYYC |
| domain | | SVHSFLAYWGQGTLVTVSSASGGGGSGGRASGGGGSDIVMTQTPLSLP |
| | | VTPGEPASISCRSSQSLLHSNGYNYLDWYLQKPGQSPQLLIYLGSNRA |
| | | SGVPDRFSGSGSGTDFTLKISRVEAEDVGVYYCMQALQTPYTFGQGTK |
| | | VEIK |
| 139105- nt | 307 | CAAGTGCAACTCGTCGAATCCGGTGGAGGTCTGGTCCAACCTGGTAGA |
| ScFv | | AGCCTGAGACTGTCGTGTGCGGCCAGCGGATTCACCTTTGATGACTAT |
| domain | | GCTATGCACTGGGTGCGGCAGGCCCCAGGAAAGGGCCTGGAATGGGTG |
| | | TCGGGAATTAGCTGGAACTCCGGGTCCATTGGCTACGCCGACTCCGTG |
| | | AAGGGCCGCTTCACCATCTCCCGCGACAACGCAAAGAACTCCCTGTAC |
| | | TTGCAAATGAACTCGCTCAGGGCTGAGGATACCGCGCTGTACTACTGC |
| | | TCCGTGCATTCCTTCCTGGCCTACTGGGGACAGGGAACTCTGGTCACC |
| | | GTGTCGAGCGCCTCCGGCGGCGGGGGCTCGGGTGGACGGGCCTCGGGC |
| | | GGAGGGGGGTCCGACATCGTGATGACCCAGACCCCGCTGAGCTTGCCC |
| | | GTGACTCCCGGAGAGCCTGCATCCATCTCCTGCCGGTCATCCCAGTCC |
| | | CTTCTCCACTCCAACGGATACAACTACCTCGACTGGTACCTCCAGAAG |
| | | CCGGGACAGAGCCCTCAGCTTCTGATCTACCTGGGGTCAAATAGAGCC |
| | | TCAGGAGTGCCGGATCGGTTCAGCGGATCTGGTTCGGGAACTGATTTC |
| | | ACTCTGAAGATTTCCCGCGTGGAAGCCGAGGACGTGGGCGTCTACTAC |
| | | TGTATGCAGGCGCTGCAGACCCCCTATACCTTCGGCCAAGGGACGAAA |
| | | GTGGAGATCAAG |
| 139105- aa | 308 | QVQLVESGGGLVQPGRSLRLSCAASGFTFDDYAMHWVRQAPGKGLEWV |
| VH | | SGISWNSGSIGYADSVKGRFTISRDNAKNSLYLQMNSLRAEDTALYYC |
| | | SVHSFLAYWGQGTLVTVSS |
| 139105- aa | 309 | DIVMTQTPLSLPVTPGEPASISCRSSQSLLHSNGYNYLDWYLQKPGQS |
| VL | | PQLLIYLGSNRASGVPDRFSGSGSGTDFTLKISRVEAEDVGVYYCMQA |
| | | LQTPYTFGQGTKVEIK |
| 139105- aa | 310 | MALPVTALLLPLALLLHAARPQVQLVESGGGLVQPGRSLRLSCAASGF |
| Full CAR | | TFDDYAMHWVRQAPGKGLEWVSGISWNSGSIGYADSVKGRFTISRDNA |
| | | KNSLYLQMNSLRAEDTALYYCSVHSFLAYWGQGTLVTVSSASGGGGSG |
| | | GRASGGGGSDIVMTQTPLSLPVTPGEPASISCRSSQSLLHSNGYNYLD |
| | | WYLQKPGQSPQLLIYLGSNRASGVPDRFSGSGSGTDFTLKISRVEAED |
| | | VGVYYCMQALQTPYTFGQGTKVEIKTTTPAPRPPTPAPTIASQPLSLR |
| | | PEACRPAAGGAVHTRGLDFACDIYIWAPLAGTCGVLLLSLVITLYCKR |
| | | GRKKLLYIFKQPFMRPVQTTQEEDGCSCRFPEEEEGGCELRVKFSRSA |
| | | DAPAYKQGQNQLYNELNLGRREEYDVLDKRRGRDPEMGGKPRRKNPQE |
| | | GLYNELQKDKMAEAYSEIGMKGERRRGKGHDGLYQGLSTATKDTYDAL |
| | | HMQALPPR |
| 139105- nt | 311 | ATGGCCCTCCCTGTCACCGCCCTGCTGCTTCCGCTGGCTCTTCTGCTC |
| Full CAR | | CACGCCGCTCGGCCCCAAGTGCAACTCGTCGAATCCGGTGGAGGTCTG |
| | | GTCCAACCTGGTAGAAGCCTGAGACTGTCGTGTGCGGCCAGCGGATTC |
| | | ACCTTTGATGACTATGCTATGCACTGGGTGCGGCAGGCCCCAGGAAAG |
| | | GGCCTGGAATGGGTGTCGGGAATTAGCTGGAACTCCGGGTCCATTGGC |
| | | TACGCCGACTCCGTGAAGGGCCGCTTCACCATCTCCCGCGACAACGCA |
| | | AAGAACTCCCTGTACTTGCAAATGAACTCGCTCAGGGCTGAGGATACC |
| | | GCGCTGTACTACTGCTCCGTGCATTCCTTCCTGGCCTACTGGGGACAG |
| | | GGAACTCTGGTCACCGTGTCGAGCGCCTCCGGCGGCGGGGGCTCGGGT |
| | | GGACGGGCCTCGGGCGGAGGGGGGTCCGACATCGTGATGACCCAGACC |
| | | CCGCTGAGCTTGCCCGTGACTCCCGGAGAGCCTGCATCCATCTCCTGC |
| | | CGGTCATCCCAGTCCCTTCTCCACTCCAACGGATACAACTACCTCGAC |
| | | TGGTACCTCCAGAAGCCGGGACAGAGCCCTCAGCTTCTGATCTACCTG |
| | | GGGTCAAATAGAGCCTCAGGAGTGCCGGATCGGTTCAGCGGATCTGGT |
| | | TCGGGAACTGATTTCACTCTGAAGATTTCCCGCGTGGAAGCCGAGGAC |
| | | GTGGGCGTCTACTACTGTATGCAGGCGCTGCAGACCCCCTATACCTTC |
| | | GGCCAAGGGACGAAAGTGGAGATCAAGACCACTACCCCAGCACCGAGG |
| | | CCACCCACCCCGGCTCCTACCATCGCCTCCCAGCCTCTGTCCCTGCGT |
| | | CCGGAGGCATGTAGACCCGCAGCTGGTGGGGCCGTGCATACCCGGGGT |
| | | CTTGACTTCGCCTGCGATATCTACATTTGGGCCCCTCTGGCTGGTACT |
| | | TGCGGGGTCCTGCTGCTTTCACTCGTGATCACTCTTTACTGTAAGCGC |
| | | GGTCGGAAGAAGCTGCTGTACATCTTTAAGCAACCCTTCATGAGGCCT |
| | | GTGCAGACTACTCAAGAGGAGGACGGCTGTTCATGCCGGTTCCCAGAG |
| | | GAGGAGGAAGGCGGCTGCGAACTGCGCGTGAAATTCAGCCGCAGCGCA |
| | | GATGCTCCAGCCTACAAGCAGGGGCAGAACCAGCTCTACAACGAACTC |
| | | AATCTTGGTCGGAGAGAGGAGTACGACGTGCTGGACAAGCGGAGAGGA |
| | | CGGGACCCAGAAATGGGCGGGAAGCCGCGCAGAAAGAATCCCCAAGAG |
| | | GGCCTGTACAACGAGCTCCAAAAGGATAAGATGGCAGAAGCCTATAGC |
| | | GAGATTGGTATGAAAGGGGAACGCAGAAGAGGCAAAGGCCACGACGGA |
| | | CTGTACCAGGGACTCAGCACCGCCACCAAGGACACCTATGACGCTCTT |
| | | CACATGCAGGCCCTGCCGCCTCGG |

139111

| | | |
|---|---|---|
| 139111- aa | 312 | EVQLLESGGGLVQPGGSLRLSCAVSGFALSNHGMSWVRRAPGKGLEWV |
| ScFv | | SGIVYSGSTYYAASVKGRFTISRDNSRNTLYLQMNSLRPEDTAIYYCS |
| domain | | AHGGESDVWGQGTTVTVSSASGGGGSGGRASGGGGSDIVMTQTPLSLS |
| | | VTPGQPASISCKSSQSLLRNDGKTPLYWYLQKAGQPPQLLIYEVSNRF |
| | | SGVPDRFSGSGSGTDFTLKISRVEAEDVGAYYCMQNIQFPSFGGGTKL |
| | | EIK |
| 139111- nt | 313 | GAAGTGCAATTGTTGGAATCTGGAGGAGGACTTGTGCAGCCTGGAGGA |
| ScFv | | TCACTGAGACTTTCGTGTGCGGTGTCAGGCTTCGCCCTGAGCAACCAC |
| domain | | GGCATGAGCTGGGTGCGGAGAGCCCCGGGGAAGGGTCTGGAATGGGTG |
| | | TCCGGGATCGTCTACTCCGGTTCAACTTACTACGCCGCAAGCGTGAAG |
| | | GGTCGCTTCACCATTTCCCGCGATAACTCCCGGAACACCCTGTACCTC |
| | | CAAATGAACTCCCTGCGGCCCGAGGACACCGCCATCTACTACTGTTCC |
| | | GCGCATGGAGGAGAGTCCGATGTCTGGGGACAGGGCACTACCGTGACC |
| | | GTGTCGAGCGCCTCGGGGGGAGGAGGCTCCGGCGGTCGCGCCTCCGGG |
| | | GGGGGTGGCAGCGACATTGTGATGACGCAGACTCCACTCTCGCTGTCC |
| | | GTGACCCCGGGACAGCCCGCGTCCATCTCGTGCAAGAGCTCCCAGAGC |
| | | CTGCTGAGGAACGACGGAAAGACTCCTCTGTATTGGTACCTCCAGAAG |
| | | GCTGGACAGCCCCCGCAACTGCTCATCTACGAAGTGTCAAATCGCTTC |
| | | TCCGGGGTGCCGGATCGGTTTTCCGGCTCGGGATCGGGCACCGACTTC |
| | | ACCCTGAAAATCTCCAGGGTCGAGGCCGAGGACGTGGGAGCCTACTAC |
| | | TGCATGCAAAACATCCAGTTCCCTTCCTTCGGCGGCGGCACAAAGCTG |
| | | GAGATTAAG |
| 139111- aa | 314 | EVQLLESGGGLVQPGGSLRLSCAVSGFALSNHGMSWVRRAPGKGLEWV |
| VH | | SGIVYSGSTYYAASVKGRFTISRDNSRNTLYLQMNSLRPEDTAIYYCS |
| | | AHGGESDVWGQGTTVTVSS |
| 139111- aa | 315 | DIVMTQTPLSLSVTPGQPASISCKSSQSLLRNDGKTPLYWYLQKAGQP |
| VL | | PQLLIYEVSNRFSGVPDRFSGSGSGTDFTLKISRVEAEDVGAYYCMQN |
| | | IQFPSFGGGTKLEIK |
| 139111- aa | 316 | MALPVTALLLPLALLLHAARPEVQLLESGGGLVQPGGSLRLSCAVSGF |
| Full CAR | | ALSNHGMSWVRRAPGKGLEWVSGIVYSGSTYYAASVKGRFTISRDNSR |
| | | NTLYLQMNSLRPEDTAIYYCSAHGGESDVWGQGTTVTVSSASGGGGSG |
| | | GRASGGGGSDIVMTQTPLSLSVTPGQPASISCKSSQSLLRNDGKTPLY |
| | | WYLQKAGQPPQLLIYEVSNRFSGVPDRFSGSGSGTDFTLKISRVEAED |
| | | VGAYYCMQNIQFPSFGGGTKLEIKTTTPAPRPPTPAPTIASQPLSLRP |
| | | EACRPAAGGAVHTRGLDFACDIYIWAPLAGTCGVLLLSLVITLYCKRG |
| | | RKKLLYIFKQPFMRPVQTTQEEDGCSCRFPEEEEGGCELRVKFSRSAD |
| | | APAYKQGQNQLYNELNLGRREEYDVLDKRRGRDPEMGGKPRRKNPQEG |
| | | LYNELQKDKMAEAYSEIGMKGERRRGKGHDGLYQGLSTATKDTYDALH |
| | | MQALPPR |
| 139111- nt | 317 | ATGGCCCTCCCTGTCACCGCCCTGCTGCTTCCGCTGGCTCTTCTGCTC |
| Full CAR | | CACGCCGCTCGGCCCGAAGTGCAATTGTTGGAATCTGGAGGAGGACTT |
| | | GTGCAGCCTGGAGGATCACTGAGACTTTCGTGTGCGGTGTCAGGCTTC |
| | | GCCCTGAGCAACCACGGCATGAGCTGGGTGCGGAGAGCCCCGGGGAAG |
| | | GGTCTGGAATGGGTGTCCGGGATCGTCTACTCCGGTTCAACTTACTAC |
| | | GCCGCAAGCGTGAAGGGTCGCTTCACCATTTCCCGCGATAACTCCCGG |
| | | AACACCCTGTACCTCCAAATGAACTCCCTGCGGCCCGAGGACACCGCC |
| | | ATCTACTACTGTTCCGCGCATGGAGGAGAGTCCGATGTCTGGGGACAG |
| | | GGCACTACCGTGACCGTGTCGAGCGCCTCGGGGGGAGGAGGCTCCGGC |
| | | GGTCGCGCCTCCGGGGGGGGTGGCAGCGACATTGTGATGACGCAGACT |
| | | CCACTCTCGCTGTCCGTGACCCCGGGACAGCCCGCGTCCATCTCGTGC |
| | | AAGAGCTCCCAGAGCCTGCTGAGGAACGACGGAAAGACTCCTCTGTAT |
| | | TGGTACCTCCAGAAGGCTGGACAGCCCCCGCAACTGCTCATCTACGAA |
| | | GTGTCAAATCGCTTCTCCGGGGTGCCGGATCGGTTTTCCGGCTCGGGA |
| | | TCGGGCACCGACTTCACCCTGAAAATCTCCAGGGTCGAGGCCGAGGAC |
| | | GTGGGAGCCTACTACTGCATGCAAAACATCCAGTTCCCTTCCTTCGGC |
| | | GGCGGCACAAAGCTGGAGATTAAGACCACTACCCCAGCACCGAGGCCA |
| | | CCCACCCCGGCTCCTACCATCGCCTCCCAGCCTCTGTCCCTGCGTCCG |
| | | GAGGCATGTAGACCCGCAGCTGGTGGGGCCGTGCATACCCGGGGTCTT |
| | | GACTTCGCCTGCGATATCTACATTTGGGCCCCTCTGGCTGGTACTTGC |
| | | GGGGTCCTGCTGCTTTCACTCGTGATCACTCTTTACTGTAAGCGCGGT |
| | | CGGAAGAAGCTGCTGTACATCTTTAAGCAACCCTTCATGAGGCCTGIG |
| | | CAGACTACTCAAGAGGAGGACGGCTGTTCATGCCGGTTCCCAGAGGAG |
| | | GAGGAAGGCGGCTGCGAACTGCGCGTGAAATTCAGCCGCAGCGCAGAT |
| | | GCTCCAGCCTACAAGCAGGGGCAGAACCAGCTCTACAACGAACTCAAT |
| | | CTTGGTCGGAGAGAGGAGTACGACGTGCTGGACAAGCGGAGAGGACGG |
| | | GACCCAGAAATGGGCGGGAAGCCGCGCAGAAAGAATCCCCAAGAGGGC |
| | | CTGTACAACGAGCTCCAAAAGGATAAGATGGCAGAAGCCTATAGCGAG |
| | | ATTGGTATGAAAGGGGAACGCAGAAGAGGCAAAGGCCACGACGGACTG |
| | | TACCAGGGACTCAGCACCGCCACCAAGGACACCTATGACGCTCTTCAC |
| | | ATGCAGGCCCTGCCGCCTCGG |

139100

| | | |
|---|---|---|
| 139100- aa | 318 | QVQLVQSGAEVRKTGASVKVSCKASGYIFDNFGINWVRQAPGQGLEWM |
| ScFv | | GWINPKNNNTNYAQKFQGRVTITADESTNTAYMEVSSLRSEDTAVYYC |
| domain | | ARGPYYYQSYMDVWGQGTMVTVSSASGGGGSGGRASGGGGSDIVMTQT |
| | | PLSLPVTPGEPASISCRSSQSLLHSNGYNYLNWYLQKPGQSPQLLIYL |
| | | GSKRASGVPDRFSGSGSGTDFTLHITRVGAEDVGVYYCMQALQTPYTF |
| | | GQGTKLEIK |
| 139100- nt | 319 | CAAGTCCAACTCGTCCAGTCCGGCGCAGAAGTCAGAAAAACCGGTGCT |
| ScFv | | AGCGTGAAAGTGTCCTGCAAGGCCTCCGGCTACATTTTCGATAACTTC |
| domain | | GGAATCAACTGGGTCAGACAGGCCCCGGGCCAGGGGCTGGAATGGATG |
| | | GGATGGATCAACCCCAAGAACAACAACACCAACTACGCACAGAAGTTC |
| | | CAGGGCCGCGTGACTATCACCGCCGATGAATCGACCAATACCGCCTAC |
| | | ATGGAGGTGTCCTCCCTGCGGTCGGAGGACACTGCCGTGTATTACTGC |
| | | GCGAGGGGCCCATACTACTACCAAAGCTACATGGACGTCTGGGGACAG |
| | | GGAACCATGGTGACCGTGTCATCCGCCTCCGGTGGTGGAGGCTCCGGG |
| | | GGGCGGGCTTCAGGAGGCGGAGGAAGCGATATTGTGATGACCCAGACT |
| | | CCGCTTAGCCTGCCCGTGACTCCTGGAGAACCGGCCTCCATTTCCTGC |
| | | CGGTCCTCGCAATCACTCCTGCATTCCAACGGTTACAACTACCTGAAT |
| | | TGGTACCTCCAGAAGCCTGGCCAGTCGCCCCAGTTGCTGATCTATCTG |
| | | GGCTCGAAGCGCGCCTCCGGGGTGCCTGACCGGTTTAGCGGATCTGGG |
| | | AGCGGCACGGACTTCACTCTCCACATCACCCGCGTGGGAGCGGAGGAC |
| | | GTGGGAGTGTACTACTGTATGCAGGCGCTGCAGACTCCGTACACATTC |
| | | GGACAGGGCACCAAGCTGGAGATCAAG |
| 139100- aa | 320 | QVQLVQSGAEVRKTGASVKVSCKASGYIFDNFGINWVRQAPGQGLEWM |
| VH | | GWINPKNNNTNYAQKFQGRVTITADESTNTAYMEVSSLRSEDTAVYYC |
| | | ARGPYYYQSYMDVWGQGTMVTVSS |
| 139100- aa | 321 | DIVMTQTPLSLPVTPGEPASISCRSSQSLLHSNGYNYLNWYLQKPGQS |
| VL | | PQLLIYLGSKRASGVPDRFSGSGSGTDFTLHITRVGAEDVGVYYCMQA |
| | | LQTPYTFGQGTKLEIK |
| 139100- aa | 322 | MALPVTALLLPLALLLHAARPQVQLVQSGAEVRKTGASVKVSCKASGY |
| Full CAR | | IFDNFGINWVRQAPGQGLEWMGWINPKNNNTNYAQKFQGRVTITADES |
| | | TNTAYMEVSSLRSEDTAVYYCARGPYYYQSYMDVWGQGTMVTVSSASG |
| | | GGGSGGRASGGGGSDIVMTQTPLSLPVTPGEPASISCRSSQSLLHSNG |
| | | YNYLNWYLQKPGQSPQLLIYLGSKRASGVPDRFSGSGSGTDFTLHITR |
| | | VGAEDVGVYYCMQALQTPYTFGQGTKLEIKTTTPAPRPPTPAPTIASQ |
| | | PLSLRPEACRPAAGGAVHTRGLDFACDIYIWAPLAGTCGVLLLSLVIT |
| | | LYCKRGRKKLLYIFKQPFMRPVQTTQEEDGCSCRFPEEEEGGCELRVK |
| | | FSRSADAPAYKQGQNQLYNELNLGRREEYDVLDKRRGRDPEMGGKPRR |
| | | KNPQEGLYNELQKDKMAEAYSEIGMKGERRRGKGHDGLYQGLSTATKD |
| | | TYDALHMQALPPR |
| 139100- nt | 323 | ATGGCCCTCCCTGTCACCGCCCTGCTGCTTCCGCTGGCTCTTCTGCTC |
| Full CAR | | CACGCCGCTCGGCCCCAAGTCCAACTCGTCCAGTCCGGCGCAGAAGTC |
| | | AGAAAAACCGGTGCTAGCGTGAAAGTGTCCTGCAAGGCCTCCGGCTAC |
| | | ATTTTCGATAACTTCGGAATCAACTGGGTCAGACAGGCCCCGGGCCAG |
| | | GGGCTGGAATGGATGGGATGGATCAACCCCAAGAACAACAACACCAAC |
| | | TACGCACAGAAGTTCCAGGGCCGCGTGACTATCACCGCCGATGAATCG |
| | | ACCAATACCGCCTACATGGAGGTGTCCTCCCTGCGGTCGGAGGACACT |
| | | GCCGTGTATTACTGCGCGAGGGGCCCATACTACTACCAAAGCTACATG |
| | | GACGTCTGGGGACAGGGAACCATGGTGACCGTGTCATCCGCCTCCGGT |
| | | GGTGGAGGCTCCGGGGGGCGGGCTTCAGGAGGCGGAGGAAGCGATATT |
| | | GTGATGACCCAGACTCCGCTTAGCCTGCCCGTGACTCCTGGAGAACCG |
| | | GCCTCCATTTCCTGCCGGTCCTCGCAATCACTCCTGCATTCCAACGGT |
| | | TACAACTACCTGAATTGGTACCTCCAGAAGCCTGGCCAGTCGCCCCAG |
| | | TTGCTGATCTATCTGGGCTCGAAGCGCGCCTCCGGGGTGCCTGACCGG |
| | | TTTAGCGGATCTGGGAGCGGCACGGACTTCACTCTCCACATCACCCGC |
| | | GTGGGAGCGGAGGACGTGGGAGTGTACTACTGTATGCAGGCGCTGCAG |
| | | ACTCCGTACACATTCGGACAGGGCACCAAGCTGGAGATCAAGACCACT |
| | | ACCCCAGCACCGAGGCCACCCACCCCGGCTCCTACCATCGCCTCCCAG |
| | | CCTCTGTCCCTGCGTCCGGAGGCATGTAGACCCGCAGCTGGTGGGGCC |
| | | GTGCATACCCGGGGTCTTGACTTCGCCTGCGATATCTACATTTGGGCC |
| | | CCTCTGGCTGGTACTTGCGGGGTCCTGCTGCTTTCACTCGTGATCACT |
| | | CTTTACTGTAAGCGCGGTCGGAAGAAGCTGCTGTACATCTTTAAGCAA |
| | | CCCTTCATGAGGCCTGTGCAGACTACTCAAGAGGAGGACGGCTGTTCA |
| | | TGCCGGTTCCCAGAGGAGGAGGAAGGCGGCTGCGAACTGCGCGTGAAA |
| | | TTCAGCCGCAGCGCAGATGCTCCAGCCTACAAGCAGGGGCAGAACCAG |
| | | CTCTACAACGAACTCAATCTTGGTCGGAGAGAGGAGTACGACGTGCTG |
| | | GACAAGCGGAGAGGACGGGACCCAGAAATGGGCGGGAAGCCGCGCAGA |
| | | AAGAATCCCCAAGAGGGCCTGTACAACGAGCTCCAAAAGGATAAGATG |
| | | GCAGAAGCCTATAGCGAGATTGGTATGAAAGGGGAACGCAGAAGAGGC |
| | | AAAGGCCACGACGGACTGTACCAGGGACTCAGCACCGCCACCAAGGAC |
| | | ACCTATGACGCTCTTCACATGCAGGCCCTGCCGCCTCGG |

139101

| | | |
|---|---|---|
| 139101- aa | 324 | QVQLQESGGGLVQPGGSLRLSCAASGFTFSSDAMTWVRQAPGKGLEWV |
| ScFv | | SVISGSGGTTYYADSVKGRFTISRDNSKNTLYLQMNSLRAEDTAVYYC |
| domain | | AKLDSSGYYYARGPRYWGQGTLVTVSSASGGGGSGGRASGGGGSDIQL |
| | | TQSPSSLSASVGDRVTITCRASQSISSYLNWYQQKPGKAPKLLIYGAS |
| | | TLASGVPARFSGSGSGTHFTLTINSLQSEDSATYYCQQSYKRASFGQG |
| | | TKVEIK |
| 139101- nt | 325 | CAAGTGCAACTTCAAGAATCAGGCGGAGGACTCGTGCAGCCCGGAGGA |
| ScFv | | TCATTGCGGCTCTCGTGCGCCGCCTCGGGCTTCACCTTCTCGAGCGAC |
| domain | | GCCATGACCTGGGTCCGCCAGGCCCCGGGGAAGGGGCTGGAATGGGTG |
| | | TCTGTGATTTCCGGCTCCGGGGGAACTACGTACTACGCCGATTCCGTG |
| | | AAAGGTCGCTTCACTATCTCCCGGGACAACAGCAAGAACACCCTTTAT |
| | | CTGCAAATGAATTCCCTCCGCGCCGAGGACACCGCCGTGTACTACTGC |
| | | GCCAAGCTGGACTCCTCGGGCTACTACTATGCCCGGGGTCCGAGATAC |
| | | TGGGGACAGGGAACCCTCGTGACCGTGTCCTCCGCGTCCGGCGGAGGA |
| | | GGGTCGGGAGGGCGGGCCTCCGGCGGCGGCGGTTCGGACATCCAGCTG |
| | | ACCCAGTCCCCATCCTCACTGAGCGCAAGCGTGGGCGACAGAGTCACC |
| | | ATTACATGCAGGGCGTCCCAGAGCATCAGCTCCTACCTGAACTGGTAC |
| | | CAACAGAAGCCTGGAAAGGCTCCTAAGCTGTTGATCTACGGGGCTTCG |
| | | ACCCTGGCATCCGGGGTGCCCGCGAGGTTTAGCGGAAGCGGTAGCGGC |
| | | ACTCACTTCACTCTGACCATTAACAGCCTCCAGTCCGAGGATTCAGCC |
| | | ACTTACTACTGTCAGCAGTCCTACAAGCGGGCCAGCTTCGGACAGGGC |
| | | ACTAAGGTCGAGATCAAG |
| 139101- aa | 326 | QVQLQESGGGLVQPGGSLRLSCAASGFTFSSDAMTWVRQAPGKGLEWV |
| VH | | SVISGSGGTTYYADSVKGRFTISRDNSKNTLYLQMNSLRAEDTAVYYC |
| | | AKLDSSGYYYARGPRYWGQGTLVTVSS |
| 139101- aa | 327 | DIQLTQSPSSLSASVGDRVTITCRASQSISSYLNWYQQKPGKAPKLLI |
| VL | | YGASTLASGVPARFSGSGSGTHFTLTINSLQSEDSATYYCQQSYKRAS |
| | | FGQGTKVEIK |
| 139101- aa | 328 | MALPVTALLLPLALLLHAARPQVQLQESGGGLVQPGGSLRLSCAASGF |
| Full CAR | | TFSSDAMTWVRQAPGKGLEWVSVISGSGGTTYYADSVKGRFTISRDNS |
| | | KNTLYLQMNSLRAEDTAVYYCAKLDSSGYYYARGPRYWGQGTLVTVSS |
| | | ASGGGGSGGRASGGGGSDIQLTQSPSSLSASVGDRVTITCRASQSISS |
| | | YLNWYQQKPGKAPKLLIYGASTLASGVPARFSGSGSGTHFTLTINSLQ |
| | | SEDSATYYCQQSYKRASFGQGTKVEIKTTTPAPRPPTPAPTIASQPLS |
| | | LRPEACRPAAGGAVHTRGLDFACDIYIWAPLAGTCGVLLLSLVITLYC |
| | | KRGRKKLLYIFKQPFMRPVQTTQEEDGCSCRFPEEEEGGCELRVKFSR |
| | | SADAPAYKQGQNQLYNELNLGRREEYDVLDKRRGRDPEMGGKPRRKNP |
| | | QEGLYNELQKDKMAEAYSEIGMKGERRRGKGHDGLYQGLSTATKDTYD |
| | | ALHMQALPPR |
| 139101- nt | 329 | ATGGCCCTCCCTGTCACCGCCCTGCTGCTTCCGCTGGCTCTTCTGCTC |
| Full CAR | | CACGCCGCTCGGCCCCAAGTGCAACTTCAAGAATCAGGCGGAGGACTC |
| | | GTGCAGCCCGGAGGATCATTGCGGCTCTCGTGCGCCGCCTCGGGCTTC |
| | | ACCTTCTCGAGCGACGCCATGACCTGGGTCCGCCAGGCCCCGGGGAAG |
| | | GGGCTGGAATGGGTGTCTGTGATTTCCGGCTCCGGGGGAACTACGTAC |
| | | TACGCCGATTCCGTGAAAGGTCGCTTCACTATCTCCCGGGACAACAGC |
| | | AAGAACACCCTTTATCTGCAAATGAATTCCCTCCGCGCCGAGGACACC |
| | | GCCGTGTACTACTGCGCCAAGCTGGACTCCTCGGGCTACTACTATGCC |
| | | CGGGGTCCGAGATACTGGGGACAGGGAACCCTCGTGACCGTGTCCTCC |
| | | GCGTCCGGCGGAGGAGGGTCGGGAGGGCGGGCCTCCGGCGGCGGCGGT |
| | | TCGGACATCCAGCTGACCCAGTCCCCATCCTCACTGAGCGCAAGCGTG |
| | | GGCGACAGAGTCACCATTACATGCAGGGCGTCCCAGAGCATCAGCTCC |
| | | TACCTGAACTGGTACCAACAGAAGCCTGGAAAGGCTCCTAAGCTGTTG |
| | | ATCTACGGGGCTTCGACCCTGGCATCCGGGGTGCCCGCGAGGTTTAGC |
| | | GGAAGCGGTAGCGGCACTCACTTCACTCTGACCATTAACAGCCTCCAG |
| | | TCCGAGGATTCAGCCACTTACTACTGTCAGCAGTCCTACAAGCGGGCC |
| | | AGCTTCGGACAGGGCACTAAGGTCGAGATCAAGACCACTACCCCAGCA |
| | | CCGAGGCCACCCACCCCGGCTCCTACCATCGCCTCCCAGCCTCTGTCC |
| | | CTGCGTCCGGAGGCATGTAGACCCGCAGCTGGTGGGGCCGTGCATACC |
| | | CGGGGTCTTGACTTCGCCTGCGATATCTACATTTGGGCCCCTCTGGCT |
| | | GGTACTTGCGGGGTCCTGCTGCTTTCACTCGTGATCACTCTTTACTGT |
| | | AAGCGCGGTCGGAAGAAGCTGCTGTACATCTTTAAGCAACCCTTCATG |
| | | AGGCCTGTGCAGACTACTCAAGAGGAGGACGGCTGTTCATGCCGGTTC |
| | | CCAGAGGAGGAGGAAGGCGGCTGCGAACTGCGCGTGAAATTCAGCCGC |
| | | AGCGCAGATGCTCCAGCCTACAAGCAGGGGCAGAACCAGCTCTACAAC |
| | | GAACTCAATCTTGGTCGGAGAGAGGAGTACGACGTGCTGGACAAGCGG |
| | | AGAGGACGGGACCCAGAAATGGGCGGGAAGCCGCGCAGAAAGAATCCC |
| | | CAAGAGGGCCTGTACAACGAGCTCCAAAAGGATAAGATGGCAGAAGCC |
| | | TATAGCGAGATTGGTATGAAAGGGGAACGCAGAAGAGGCAAAGGCCAC |
| | | GACGGACTGTACCAGGGACTCAGCACCGCCACCAAGGACACCTATGAC |
| | | GCTCTTCACATGCAGGCCCTGCCGCCTCGG |

139102

| | | |
|---|---|---|
| 139102- aa | 330 | QVQLVQSGAEVKKPGASVKVSCKASGYTFSNYGITWVRQAPGQGLEWM |
| ScFv | | GWISAYNGNTNYAQKFQGRVTMTRNTSISTAYMELSSLRSEDTAVYYC |
| domain | | ARGPYYYYMDVWGKGTMVTVSSASGGGGSGGRASGGGGSEIVMTQSPL |
| | | SLPVTPGEPASISCRSSQSLLYSNGYNYVDWYLQKPGQSPQLLIYLGS |
| | | NRASGVPDRFSGSGSGTDFKLQISRVEAEDVGIYYCMQGRQFPYSFGQ |
| | | GTKVEIK |
| 139102- nt | 331 | CAAGTCCAACTGGTCCAGAGCGGTGCAGAAGTGAAGAAGCCCGGAGCG |
| ScFv | | AGCGTGAAAGTGTCCTGCAAGGCTTCCGGGTACACCTTCTCCAACTAC |
| domain | | GGCATCACTTGGGTGCGCCAGGCCCCGGGACAGGGCCTGGAATGGATG |
| | | GGGTGGATTTCCGCGTACAACGGCAATACGAACTACGCTCAGAAGTTC |
| | | CAGGGTAGAGTGACCATGACTAGGAACACCTCCATTTCCACCGCCTAC |
| | | ATGGAACTGTCCTCCCTGCGGAGCGAGGACACCGCCGTGTACTATTGC |
| | | GCCCGGGGACCATACTACTACTACATGGATGTCTGGGGGAAGGGGACT |
| | | ATGGTCACCGTGTCATCCGCCTCGGGAGGCGGCGGATCAGGAGGACGC |
| | | GCCTCTGGTGGTGGAGGATCGGAGATCGTGATGACCCAGAGCCCTCTC |
| | | TCCTTGCCCGTGACTCCTGGGGAGCCCGCATCCATTTCATGCCGGAGC |
| | | TCCCAGTCACTTCTCTACTCCAACGGCTATAACTACGTGGATTGGTAC |
| | | CTCCAAAAGCCGGGCCAGAGCCCGCAGCTGCTGATCTACCTGGGCTCG |
| | | AACAGGGCCAGCGGAGTGCCTGACCGGTTCTCCGGGTCGGGAAGCGGG |
| | | ACCGACTTCAAGCTGCAAATCTCGAGAGTGGAGGCCGAGGACGTGGGA |
| | | ATCTACTACTGTATGCAGGGCCGCCAGTTTCCGTACTCGTTCGGACAG |
| | | GGCACCAAAGTGGAAATCAAG |
| 139102- aa | 332 | QVQLVQSGAEVKKPGASVKVSCKASGYTFSNYGITWVRQAPGQGLEWM |
| VH | | GWISAYNGNTNYAQKFQGRVTMTRNTSISTAYMELSSLRSEDTAVYYC |
| | | ARGPYYYYMDVWGKGTMVTVSS |
| 139102- aa | 333 | EIVMTQSPLSLPVTPGEPASISCRSSQSLLYSNGYNYVDWYLQKPGQS |
| VL | | PQLLIYLGSNRASGVPDRFSGSGSGTDFKLQISRVEAEDVGIYYCMQG |
| | | RQFPYSFGQGTKVEIK |
| 139102- aa | 334 | MALPVTALLLPLALLLHAARPQVQLVQSGAEVKKPGASVKVSCKASGY |
| Full CAR | | TFSNYGITWVRQAPGQGLEWMGWISAYNGNTNYAQKFQGRVTMTRNTS |
| | | ISTAYMELSSLRSEDTAVYYCARGPYYYYMDVWGKGTMVTVSSASGGG |
| | | GSGGRASGGGGSEIVMTQSPLSLPVTPGEPASISCRSSQSLLYSNGYN |
| | | YVDWYLQKPGQSPQLLIYLGSNRASGVPDRFSGSGSGTDFKLQISRVE |
| | | AEDVGIYYCMQGRQFPYSFGQGTKVEIKTTTPAPRPPTPAPTIASQPL |
| | | SLRPEACRPAAGGAVHTRGLDFACDIYIWAPLAGTCGVLLLSLVITLY |
| | | CKRGRKKLLYIFKQPFMRPVQTTQEEDGCSCRFPEEEEGGCELRVKFS |
| | | RSADAPAYKQGQNQLYNELNLGRREEYDVLDKRRGRDPEMGGKPRRKN |
| | | PQEGLYNELQKDKMAEAYSEIGMKGERRRGKGHDGLYQGLSTATKDTY |
| | | DALHMQALPPR |
| 139102- nt | 335 | ATGGCCCTCCCTGTCACCGCCCTGCTGCTTCCGCTGGCTCTTCTGCTC |
| Full CAR | | CACGCCGCTCGGCCCCAAGTCCAACTGGTCCAGAGCGGTGCAGAAGTG |
| | | AAGAAGCCCGGAGCGAGCGTGAAAGTGTCCTGCAAGGCTTCCGGGTAC |
| | | ACCTTCTCCAACTACGGCATCACTTGGGTGCGCCAGGCCCCGGGACAG |
| | | GGCCTGGAATGGATGGGGTGGATTTCCGCGTACAACGGCAATACGAAC |
| | | TACGCTCAGAAGTTCCAGGGTAGAGTGACCATGACTAGGAACACCTCC |
| | | ATTTCCACCGCCTACATGGAACTGTCCTCCCTGCGGAGCGAGGACACC |
| | | GCCGTGTACTATTGCGCCCGGGGACCATACTACTACTACATGGATGTC |
| | | TGGGGGAAGGGGACTATGGTCACCGTGTCATCCGCCTCGGGAGGCGGC |
| | | GGATCAGGAGGACGCGCCTCTGGTGGTGGAGGATCGGAGATCGTGATG |
| | | ACCCAGAGCCCTCTCTCCTTGCCCGTGACTCCTGGGGAGCCCGCATCC |
| | | ATTTCATGCCGGAGCTCCCAGTCACTTCTCTACTCCAACGGCTATAAC |
| | | TACGTGGATTGGTACCTCCAAAAGCCGGGCCAGAGCCCGCAGCTGCTG |
| | | ATCTACCTGGGCTCGAACAGGGCCAGCGGAGTGCCTGACCGGTTCTCC |
| | | GGGTCGGGAAGCGGGACCGACTTCAAGCTGCAAATCTCGAGAGTGGAG |
| | | GCCGAGGACGTGGGAATCTACTACTGTATGCAGGGCCGCCAGTTTCCG |
| | | TACTCGTTCGGACAGGGCACCAAAGTGGAAATCAAGACCACTACCCCA |
| | | GCACCGAGGCCACCCACCCCGGCTCCTACCATCGCCTCCCAGCCTCTG |
| | | TCCCTGCGTCCGGAGGCATGTAGACCCGCAGCTGGTGGGGCCGTGCAT |
| | | ACCCGGGGTCTTGACTTCGCCTGCGATATCTACATTTGGGCCCCTCTG |
| | | GCTGGTACTTGCGGGGTCCTGCTGCTTTCACTCGTGATCACTCTTTAC |
| | | TGTAAGCGCGGTCGGAAGAAGCTGCTGTACATCTTTAAGCAACCCTTC |
| | | ATGAGGCCTGTGCAGACTACTCAAGAGGAGGACGGCTGTTCATGCCGG |
| | | TTCCCAGAGGAGGAGGAAGGCGGCTGCGAACTGCGCGTGAAATTCAGC |
| | | CGCAGCGCAGATGCTCCAGCCTACAAGCAGGGGCAGAACCAGCTCTAC |
| | | AACGAACTCAATCTTGGTCGGAGAGAGGAGTACGACGTGCTGGACAAG |
| | | CGGAGAGGACGGGACCCAGAAATGGGCGGGAAGCCGCGCAGAAAGAAT |
| | | CCCCAAGAGGGCCTGTACAACGAGCTCCAAAAGGATAAGATGGCAGAA |
| | | GCCTATAGCGAGATTGGTATGAAAGGGGAACGCAGAAGAGGCAAAGGC |
| | | CACGACGGACTGTACCAGGGACTCAGCACCGCCACCAAGGACACCTAT |
| | | GACGCTCTTCACATGCAGGCCCTGCCGCCTCGG |

139104

| | | |
|---|---|---|
| 139104- aa | 336 | EVQLLETGGGLVQPGGSLRLSCAVSGFALSNHGMSWVRRAPGKGLEWV |
| ScFv | | SGIVYSGSTYYAASVKGRFTISRDNSRNTLYLQMNSLRPEDTAIYYCS |
| domain | | AHGGESDVWGQGTTVTVSSASGGGGSGGRASGGGGSEIVLTQSPATLS |
| | | VSPGESATLSCRASQSVSSNLAWYQQKPGQAPRLLIYGASTRASGIPD |
| | | RFSGSGSGTDFTLTISSLQAEDVAVYYCQQYGSSLTFGGGTKVEIK |
| 139104- nt | 337 | GAAGTGCAATTGCTCGAAACTGGAGGAGGTCTGGTGCAACCTGGAGGA |
| ScFv | | TCACTTCGCCTGTCCTGCGCCGTGTCGGGCTTTGCCCTGTCCAACCAT |
| domain | | GGAATGAGCTGGGTCCGCCGCGCGCCGGGGAAGGGCCTCGAATGGGTG |
| | | TCCGGCATCGTCTACTCCGGCTCCACCTACTACGCCGCGTCCGTGAAG |
| | | GGCCGGTTCACGATTTCACGGGACAACTCGCGGAACACCCTGTACCTC |
| | | CAAATGAATTCCCTTCGGCCGGAGGATACTGCCATCTACTACTGCTCC |
| | | GCCCACGGTGGCGAATCCGACGTCTGGGGCCAGGGAACCACCGTGACC |
| | | GTGTCCAGCGCGTCCGGGGGAGGAGGAAGCGGGGGTAGAGCATCGGGT |
| | | GGAGGCGGATCAGAGATCGTGCTGACCCAGTCCCCCGCCACCTTGAGC |
| | | GTGTCACCAGGAGAGTCCGCCACCCTGTCATGCCGCGCCAGCCAGTCC |
| | | GTGTCCTCCAACCTGGCTTGGTACCAGCAGAAGCCGGGGCAGGCCCCT |
| | | AGACTCCTGATCTATGGGGCGTCGACCCGGGCATCTGGAATTCCCGAT |
| | | AGGTTCAGCGGATCGGGCTCGGGCACTGACTTCACTCTGACCATCTCC |
| | | TCGCTGCAAGCCGAGGACGTGGCTGTGTACTACTGTCAGCAGTACGGA |
| | | AGCTCCCTGACTTTCGGTGGCGGGACCAAAGTCGAGATTAAG |
| 139104- aa | 338 | EVQLLETGGGLVQPGGSLRLSCAVSGFALSNHGMSWVRRAPGKGLEWV |
| VH | | SGIVYSGSTYYAASVKGRFTISRDNSRNTLYLQMNSLRPEDTAIYYCS |
| | | AHGGESDVWGQGTTVTVSS |
| 139104- aa | 339 | EIVLTQSPATLSVSPGESATLSCRASQSVSSNLAWYQQKPGQAPRLLI |
| VL | | YGASTRASGIPDRFSGSGSGTDFTLTISSLQAEDVAVYYCQQYGSSLT |
| | | FGGGTKVEIK |
| 139104- aa | 340 | MALPVTALLLPLALLLHAARPEVQLLETGGGLVQPGGSLRLSCAVSGF |
| Full CAR | | ALSNHGMSWVRRAPGKGLEWVSGIVYSGSTYYAASVKGRFTISRDNSR |
| | | NTLYLQMNSLRPEDTAIYYCSAHGGESDVWGQGTTVTVSSASGGGGSG |
| | | GRASGGGGSEIVLTQSPATLSVSPGESATLSCRASQSVSSNLAWYQQK |
| | | PGQAPRLLIYGASTRASGIPDRFSGSGSGTDFTLTISSLQAEDVAVYY |
| | | CQQYGSSLTFGGGTKVEIKTTTPAPRPPTPAPTIASQPLSLRPEACRP |
| | | AAGGAVHTRGLDFACDIYIWAPLAGTCGVLLLSLVITLYCKRGRKKLL |
| | | YIFKQPFMRPVQTTQEEDGCSCRFPEEEEGGCELRVKFSRSADAPAYK |
| | | QGQNQLYNELNLGRREEYDVLDKRRGRDPEMGGKPRRKNPQEGLYNEL |
| | | QKDKMAEAYSEIGMKGERRRGKGHDGLYQGLSTATKDTYDALHMQALP |
| | | PR |
| 139104- nt | 341 | ATGGCCCTCCCTGTCACCGCCCTGCTGCTTCCGCTGGCTCTTCTGCTC |
| Full CAR | | CACGCCGCTCGGCCCGAAGTGCAATTGCTCGAAACTGGAGGAGGTCTG |
| | | GTGCAACCTGGAGGATCACTTCGCCTGTCCTGCGCCGTGTCGGGCTTT |
| | | GCCCTGTCCAACCATGGAATGAGCTGGGTCCGCCGCGCGCCGGGGAAG |
| | | GGCCTCGAATGGGTGTCCGGCATCGTCTACTCCGGCTCCACCTACTAC |
| | | GCCGCGTCCGTGAAGGGCCGGTTCACGATTTCACGGGACAACTCGCGG |
| | | AACACCCTGTACCTCCAAATGAATTCCCTTCGGCCGGAGGATACTGCC |
| | | ATCTACTACTGCTCCGCCCACGGTGGCGAATCCGACGTCTGGGGCCAG |
| | | GGAACCACCGTGACCGTGTCCAGCGCGTCCGGGGGAGGAGGAAGCGGG |
| | | GGTAGAGCATCGGGTGGAGGCGGATCAGAGATCGTGCTGACCCAGTCC |
| | | CCCGCCACCTTGAGCGTGTCACCAGGAGAGTCCGCCACCCTGTCATGC |
| | | CGCGCCAGCCAGTCCGTGTCCTCCAACCTGGCTTGGTACCAGCAGAAG |
| | | CCGGGGCAGGCCCCTAGACTCCTGATCTATGGGGCGTCGACCCGGGCA |
| | | TCTGGAATTCCCGATAGGTTCAGCGGATCGGGCTCGGGCACTGACTTC |
| | | ACTCTGACCATCTCCTCGCTGCAAGCCGAGGACGTGGCTGTGTACTAC |
| | | TGTCAGCAGTACGGAAGCTCCCTGACTTTCGGTGGCGGGACCAAAGTC |
| | | GAGATTAAGACCACTACCCCAGCACCGAGGCCACCCACCCCGGCTCCT |
| | | ACCATCGCCTCCCAGCCTCTGTCCCTGCGTCCGGAGGCATGTAGACCC |
| | | GCAGCTGGTGGGGCCGTGCATACCCGGGGTCTTGACTTCGCCTGCGAT |
| | | ATCTACATTTGGGCCCCTCTGGCTGGTACTTGCGGGGTCCTGCTGCTT |
| | | TCACTCGTGATCACTCTTTACTGTAAGCGCGGTCGGAAGAAGCTGCTG |
| | | TACATCTTTAAGCAACCCTTCATGAGGCCTGTGCAGACTACTCAAGAG |
| | | GAGGACGGCTGTTCATGCCGGTTCCCAGAGGAGGAGGAAGGCGGCTGC |
| | | GAACTGCGCGTGAAATTCAGCCGCAGCGCAGATGCTCCAGCCTACAAG |
| | | CAGGGGCAGAACCAGCTCTACAACGAACTCAATCTTGGTCGGAGAGAG |
| | | GAGTACGACGTGCTGGACAAGCGGAGAGGACGGGACCCAGAAATGGGC |
| | | GGGAAGCCGCGCAGAAAGAATCCCCAAGAGGGCCTGTACAACGAGCTC |
| | | CAAAAGGATAAGATGGCAGAAGCCTATAGCGAGATTGGTATGAAAGGG |
| | | GAACGCAGAAGAGGCAAAGGCCACGACGGACTGTACCAGGGACTCAGC |
| | | ACCGCCACCAAGGACACCTATGACGCTCTTCACATGCAGGCCCTGCCG |
| | | CCTCGG |

139106

| | | |
|---|---|---|
| 139106- aa | 342 | EVQLVETGGGLVQPGGSLRLSCAVSGFALSNHGMSWVRRAPGKGLEWV |
| ScFv | | SGIVYSGSTYYAASVKGRFTISRDNSRNTLYLQMNSLRPEDTAIYYCS |
| domain | | AHGGESDVWGQGTTVTVSSASGGGGSGGRASGGGGSEIVMTQSPATLS |
| | | VSPGERATLSCRASQSVSSKLAWYQQKPGQAPRLLMYGASIRATGIPD |
| | | RFSGSGSGTEFTLTISSLEPEDFAVYYCQQYGSSSWTFGQGTKVEIK |
| 139106- nt | 343 | GAAGTGCAATTGGTGGAAACTGGAGGAGGACTTGTGCAACCTGGAGGA |
| ScFv | | TCATTGAGACTGAGCTGCGCAGTGTCGGGATTCGCCCTGAGCAACCAT |
| domain | | GGAATGTCCTGGGTCAGAAGGGCCCCTGGAAAAGGCCTCGAATGGGTG |
| | | TCAGGGATCGTGTACTCCGGTTCCACTTACTACGCCGCCTCCGTGAAG |
| | | GGGCGCTTCACTATCTCACGGGATAACTCCCGCAATACCCTGTACCTC |
| | | CAAATGAACAGCCTGCGGCCGGAGGATACCGCCATCTACTACTGTTCC |
| | | GCCCACGGTGGAGAGTCTGACGTCTGGGGCCAGGGAACTACCGTGACC |
| | | GTGTCCTCCGCGTCCGGCGGTGGAGGGAGCGGCGGCCGCGCCAGCGGC |
| | | GGCGGAGGCTCCGAGATCGTGATGACCCAGAGCCCCGCTACTCTGTCG |
| | | GTGTCGCCCGGAGAAAGGGCGACCCTGTCCTGCCGGGCGTCGCAGTCC |
| | | GTGAGCAGCAAGCTGGCTTGGTACCAGCAGAAGCCGGGCCAGGCACCA |
| | | CGCCTGCTTATGTACGGTGCCTCCATTCGGGCCACCGGAATCCCGGAC |
| | | CGGTTCTCGGGGTCGGGGTCCGGTACCGAGTTCACACTGACCATTTCC |
| | | TCGCTCGAGCCCGAGGACTTTGCCGTCTATTACTGCCAGCAGTACGGC |
| | | TCCTCCTCATGGACGTTCGGCCAGGGGACCAAGGTCGAAATCAAG |
| 139106- aa | 344 | EVQLVETGGGLVQPGGSLRLSCAVSGFALSNHGMSWVRRAPGKGLEWV |
| VH | | SGIVYSGSTYYAASVKGRFTISRDNSRNTLYLQMNSLRPEDTAIYYCS |
| | | AHGGESDVWGQGTTVTVSS |
| 139106- aa | 345 | EIVMTQSPATLSVSPGERATLSCRASQSVSSKLAWYQQKPGQAPRLLM |
| VL | | YGASIRATGIPDRFSGSGSGTEFTLTISSLEPEDFAVYYCQQYGSSSW |
| | | TFGQGTKVEIK |
| 139106- aa | 346 | MALPVTALLLPLALLLHAARPEVQLVETGGGLVQPGGSLRLSCAVSGF |
| Full CAR | | ALSNHGMSWVRRAPGKGLEWVSGIVYSGSTYYAASVKGRFTISRDNSR |
| | | NTLYLQMNSLRPEDTAIYYCSAHGGESDVWGQGTTVTVSSASGGGGSG |
| | | GRASGGGGSEIVMTQSPATLSVSPGERATLSCRASQSVSSKLAWYQQK |
| | | PGQAPRLLMYGASIRATGIPDRFSGSGSGTEFTLTISSLEPEDFAVYY |
| | | CQQYGSSSWTFGQGTKVEIKTTTPAPRPPTPAPTIASQPLSLRPEACR |
| | | PAAGGAVHTRGLDFACDIYIWAPLAGTCGVLLLSLVITLYCKRGRKKL |
| | | LYIFKQPFMRPVQTTQEEDGCSCRFPEEEEGGCELRVKFSRSADAPAY |
| | | KQGQNQLYNELNLGRREEYDVLDKRRGRDPEMGGKPRRKNPQEGLYNE |
| | | LQKDKMAEAYSEIGMKGERRRGKGHDGLYQGLSTATKDTYDALHMQAL |
| | | PPR |
| 139106- nt | 347 | ATGGCCCTCCCTGTCACCGCCCTGCTGCTTCCGCTGGCTCTTCTGCTC |
| Full CAR | | CACGCCGCTCGGCCCGAAGTGCAATTGGTGGAAACTGGAGGAGGACTT |
| | | GTGCAACCTGGAGGATCATTGAGACTGAGCTGCGCAGTGTCGGGATTC |
| | | GCCCTGAGCAACCATGGAATGTCCTGGGTCAGAAGGGCCCCTGGAAAA |
| | | GGCCTCGAATGGGTGTCAGGGATCGTGTACTCCGGTTCCACTTACTAC |
| | | GCCGCCTCCGTGAAGGGGCGCTTCACTATCTCACGGGATAACTCCCGC |
| | | AATACCCTGTACCTCCAAATGAACAGCCTGCGGCCGGAGGATACCGCC |
| | | ATCTACTACTGTTCCGCCCACGGTGGAGAGTCTGACGTCTGGGGCCAG |
| | | GGAACTACCGTGACCGTGTCCTCCGCGTCCGGCGGTGGAGGGAGCGGC |
| | | GGCCGCGCCAGCGGCGGCGGAGGCTCCGAGATCGTGATGACCCAGAGC |
| | | CCCGCTACTCTGTCGGTGTCGCCCGGAGAAAGGGCGACCCTGTCCTGC |
| | | CGGGCGTCGCAGTCCGTGAGCAGCAAGCTGGCTTGGTACCAGCAGAAG |
| | | CCGGGCCAGGCACCACGCCTGCTTATGTACGGTGCCTCCATTCGGGCC |
| | | ACCGGAATCCCGGACCGGTTCTCGGGGTCGGGGTCCGGTACCGAGTTC |
| | | ACACTGACCATTTCCTCGCTCGAGCCCGAGGACTTTGCCGTCTATTAC |
| | | TGCCAGCAGTACGGCTCCTCCTCATGGACGTTCGGCCAGGGGACCAAG |
| | | GTCGAAATCAAGACCACTACCCCAGCACCGAGGCCACCCACCCCGGCT |
| | | CCTACCATCGCCTCCCAGCCTCTGTCCCTGCGTCCGGAGGCATGTAGA |
| | | CCCGCAGCTGGTGGGGCCGTGCATACCCGGGGTCTTGACTTCGCCTGC |
| | | GATATCTACATTTGGGCCCCTCTGGCTGGTACTTGCGGGGTCCTGCTG |
| | | CTTTCACTCGTGATCACTCTTTACTGTAAGCGCGGTCGGAAGAAGCTG |
| | | CTGTACATCTTTAAGCAACCCTTCATGAGGCCTGTGCAGACTACTCAA |
| | | GAGGAGGACGGCTGTTCATGCCGGTTCCCAGAGGAGGAGGAAGGCGGC |
| | | TGCGAACTGCGCGTGAAATTCAGCCGCAGCGCAGATGCTCCAGCCTAC |
| | | AAGCAGGGGCAGAACCAGCTCTACAACGAACTCAATCTTGGTCGGAGA |
| | | GAGGAGTACGACGTGCTGGACAAGCGGAGAGGACGGGACCCAGAAATG |
| | | GGCGGGAAGCCGCGCAGAAAGAATCCCCAAGAGGGCCTGTACAACGAG |
| | | CTCCAAAAGGATAAGATGGCAGAAGCCTATAGCGAGATTGGTATGAAA |
| | | GGGGAACGCAGAAGAGGCAAAGGCCACGACGGACTGTACCAGGGACTC |
| | | AGCACCGCCACCAAGGACACCTATGACGCTCTTCACATGCAGGCCCTG |
| | | CCGCCTCGG |

139107

| | | |
|---|---|---|
| 139107- aa | 348 | EVQLVETGGGVVQPGGSLRLSCAVSGFALSNHGMSWVRRAPGKGLEWV |
| ScFv | | SGIVYSGSTYYAASVKGRFTISRDNSRNTLYLQMNSLRPEDTAIYYCS |
| domain | | AHGGESDVWGQGTTVTVSSASGGGGSGGRASGGGGSEIVLTQSPGTLS |
| | | LSPGERATLSCRASQSVGSTNLAWYQQKPGQAPRLLIYDASNRATGIP |
| | | DRFSGGGSGTDFTLTISRLEPEDFAVYYCQQYGSSPPWTFGQGTKVEI |
| | | K |
| 139107- nt | 349 | GAAGTGCAATTGGTGGAGACTGGAGGAGGAGTGGTGCAACCTGGAGGA |
| ScFv | | AGCCTGAGACTGTCATGCGCGGTGTCGGGCTTCGCCCTCTCCAACCAC |
| domain | | GGAATGTCCTGGGTCCGCCGGGCCCCTGGGAAAGGACTTGAATGGGTG |
| | | TCCGGCATCGTGTACTCGGGTTCCACCTACTACGCGGCCTCAGTGAAG |
| | | GGCCGGTTTACTATTAGCCGCGACAACTCCAGAAACACACTGTACCTC |
| | | CAAATGAACTCGCTGCGGCCGGAAGATACCGCTATCTACTACTGCTCC |
| | | GCCCATGGGGGAGAGTCGGACGTCTGGGGACAGGGCACCACTGTCACT |
| | | GTGTCCAGCGCTTCCGGCGGTGGTGGAAGCGGGGGACGGGCCTCAGGA |
| | | GGCGGTGGCAGCGAGATTGTGCTGACCCAGTCCCCCGGGACCCTGAGC |
| | | CTGTCCCCGGGAGAAAGGGCCACCCTCTCCTGTCGGGCATCCCAGTCC |
| | | GTGGGGTCTACTAACCTTGCATGGTACCAGCAGAAGCCCGGCCAGGCC |
| | | CCTCGCCTGCTGATCTACGACGCGTCCAATAGAGCCACCGGCATCCCG |
| | | GATCGCTTCAGCGGAGGCGGATCGGGCACCGACTTCACCCTCACCATT |
| | | TCAAGGCTGGAACCGGAGGACTTCGCCGTGTACTACTGCCAGCAGTAT |
| | | GGTTCGTCCCCACCCTGGACGTTCGGCCAGGGGACTAAGGTCGAGATC |
| | | AAG |
| 139107- aa | 350 | EVQLVETGGGVVQPGGSLRLSCAVSGFALSNHGMSWVRRAPGKGLEWV |
| VH | | SGIVYSGSTYYAASVKGRFTISRDNSRNTLYLQMNSLRPEDTAIYYCS |
| | | AHGGESDVWGQGTTVTVSS |
| 139107- aa | 351 | EIVLTQSPGTLSLSPGERATLSCRASQSVGSTNLAWYQQKPGQAPRLL |
| VL | | IYDASNRATGIPDRFSGGGSGTDFTLTISRLEPEDFAVYYCQQYGSSP |
| | | PWTFGQGTKVEIK |
| 139107- aa | 352 | MALPVTALLLPLALLLHAARPEVQLVETGGGVVQPGGSLRLSCAVSGF |
| Full CAR | | ALSNHGMSWVRRAPGKGLEWVSGIVYSGSTYYAASVKGRFTISRDNSR |
| | | NTLYLQMNSLRPEDTAIYYCSAHGGESDVWGQGTTVTVSSASGGGGSG |
| | | GRASGGGGSEIVLTQSPGTLSLSPGERATLSCRASQSVGSTNLAWYQQ |
| | | KPGQAPRLLIYDASNRATGIPDRFSGGGSGTDFTLTISRLEPEDFAVY |
| | | YCQQYGSSPPWTFGQGTKVEIKTTTPAPRPPTPAPTIASQPLSLRPEA |
| | | CRPAAGGAVHTRGLDFACDIYIWAPLAGTCGVLLLSLVITLYCKRGRK |
| | | KLLYIFKQPFMRPVQTTQEEDGCSCRFPEEEEGGCELRVKFSRSADAP |
| | | AYKQGQNQLYNELNLGRREEYDVLDKRRGRDPEMGGKPRRKNPQEGLY |
| | | NELQKDKMAEAYSEIGMKGERRRGKGHDGLYQGLSTATKDTYDALHMQ |
| | | ALPPR |
| 139107- nt | 353 | ATGGCCCTCCCTGTCACCGCCCTGCTGCTTCCGCTGGCTCTTCTGCTC |
| Full CAR | | CACGCCGCTCGGCCCGAAGTGCAATTGGTGGAGACTGGAGGAGGAGTG |
| | | GTGCAACCTGGAGGAAGCCTGAGACTGTCATGCGCGGTGTCGGGCTTC |
| | | GCCCTCTCCAACCACGGAATGTCCTGGGTCCGCCGGGCCCCTGGGAAA |
| | | GGACTTGAATGGGTGTCCGGCATCGTGTACTCGGGTTCCACCTACTAC |
| | | GCGGCCTCAGTGAAGGGCCGGTTTACTATTAGCCGCGACAACTCCAGA |
| | | AACACACTGTACCTCCAAATGAACTCGCTGCGGCCGGAAGATACCGCT |
| | | ATCTACTACTGCTCCGCCCATGGGGGAGAGTCGGACGTCTGGGGACAG |
| | | GGCACCACTGTCACTGTGTCCAGCGCTTCCGGCGGTGGTGGAAGCGGG |
| | | GGACGGGCCTCAGGAGGCGGTGGCAGCGAGATTGTGCTGACCCAGTCC |
| | | CCCGGGACCCTGAGCCTGTCCCCGGGAGAAAGGGCCACCCTCTCCTGT |
| | | CGGGCATCCCAGTCCGTGGGGTCTACTAACCTTGCATGGTACCAGCAG |
| | | AAGCCCGGCCAGGCCCCTCGCCTGCTGATCTACGACGCGTCCAATAGA |
| | | GCCACCGGCATCCCGGATCGCTTCAGCGGAGGCGGATCGGGCACCGAC |
| | | TTCACCCTCACCATTTCAAGGCTGGAACCGGAGGACTTCGCCGTGTAC |
| | | TACTGCCAGCAGTATGGTTCGTCCCCACCCTGGACGTTCGGCCAGGGG |
| | | ACTAAGGTCGAGATCAAGACCACTACCCCAGCACCGAGGCCACCCACC |
| | | CCGGCTCCTACCATCGCCTCCCAGCCTCTGTCCCTGCGTCCGGAGGCA |
| | | TGTAGACCCGCAGCTGGTGGGGCCGTGCATACCCGGGGTCTTGACTTC |
| | | GCCTGCGATATCTACATTTGGGCCCCTCTGGCTGGTACTTGCGGGGTC |
| | | CTGCTGCTTTCACTCGTGATCACTCTTTACTGTAAGCGCGGTCGGAAG |
| | | AAGCTGCTGTACATCTTTAAGCAACCCTTCATGAGGCCTGTGCAGACT |
| | | ACTCAAGAGGAGGACGGCTGTTCATGCCGGTTCCCAGAGGAGGAGGAA |
| | | GGCGGCTGCGAACTGCGCGTGAAATTCAGCCGCAGCGCAGATGCTCCA |
| | | GCCTACAAGCAGGGGCAGAACCAGCTCTACAACGAACTCAATCTTGGT |
| | | CGGAGAGAGGAGTACGACGTGCTGGACAAGCGGAGAGGACGGGACCCA |
| | | GAAATGGGCGGGAAGCCGCGCAGAAAGAATCCCCAAGAGGGCCTGTAC |
| | | AACGAGCTCCAAAAGGATAAGATGGCAGAAGCCTATAGCGAGATTGGT |
| | | ATGAAAGGGGAACGCAGAAGAGGCAAAGGCCACGACGGACTGTACCAG |
| | | GGACTCAGCACCGCCACCAAGGACACCTATGACGCTCTTCACATGCAG |
| | | GCCCTGCCGCCTCGG |

139108

| | | |
|---|---|---|
| 139108- aa | 354 | QVQLVESGGGLVKPGGSLRLSCAASGFTFSDYYMSWIRQAPGKGLEWV |
| ScFv | | SYISSSGSTIYYADSVKGRFTISRDNAKNSLYLQMNSLRAEDTAVYYC |
| domain | | ARESGDGMDVWGQGTTVTVSSASGGGGSGGRASGGGGSDIQMTQSPSS |
| | | LSASVGDRVTITCRASQSISSYLNWYQQKPGKAPKLLIYAASSLQSGV |
| | | PSRFSGSGSGTDFTLTISSLQPEDFATYYCQQSYTLAFGQGTKVDIK |
| 139108- nt | 355 | CAAGTGCAACTCGTGGAATCTGGTGGAGGACTCGTGAAACCTGGAGGA |
| ScFv | | TCATTGAGACTGTCATGCGCGGCCTCGGGATTCACGTTCTCCGATTAC |
| domain | | TACATGAGCTGGATTCGCCAGGCTCCGGGGAAGGGACTGGAATGGGTG |
| | | TCCTACATTTCCTCATCCGGCTCCACCATCTACTACGCGGACTCCGTG |
| | | AAGGGGAGATTCACCATTAGCCGCGATAACGCCAAGAACAGCCTGTAC |
| | | CTTCAGATGAACTCCCTGCGGGCTGAAGATACTGCCGTCTACTACTGC |
| | | GCAAGGGAGAGCGGAGATGGGATGGACGTCTGGGGACAGGGTACCACT |
| | | GTGACCGTGTCGTCGGCCTCCGGCGGAGGGGGTTCGGGTGGAAGGGCC |
| | | AGCGGCGGCGGAGGCAGCGACATCCAGATGACCCAGTCCCCCTCATCG |
| | | CTGTCCGCCTCCGTGGGCGACCGCGTCACCATCACATGCCGGGCCTCA |
| | | CAGTCGATCTCCTCCTACCTCAATTGGTATCAGCAGAAGCCCGGAAAG |
| | | GCCCCTAAGCTTCTGATCTACGCAGCGTCCTCCCTGCAATCCGGGGTC |
| | | CCATCTCGGTTCTCCGGCTCGGGCAGCGGTACCGACTTCACTCTGACC |
| | | ATCTCGAGCCTGCAGCCGGAGGACTTCGCCACTTACTACTGTCAGCAA |
| | | AGCTACACCCTCGCGTTTGGCCAGGGCACCAAAGTGGACATCAAG |
| 139108- aa | 356 | QVQLVESGGGLVKPGGSLRLSCAASGFTFSDYYMSWIRQAPGKGLEWV |
| VH | | SYISSSGSTIYYADSVKGRFTISRDNAKNSLYLQMNSLRAEDTAVYYC |
| | | ARESGDGMDVWGQGTTVTVSS |
| 139108- aa | 357 | DIQMTQSPSSLSASVGDRVTITCRASQSISSYLNWYQQKPGKAPKLLI |
| VL | | YAASSLQSGVPSRFSGSGSGTDFTLTISSLQPEDFATYYCQQSYTLAF |
| | | GQGTKVDIK |
| 139108- aa | 358 | MALPVTALLLPLALLLHAARPQVQLVESGGGLVKPGGSLRLSCAASGF |
| Full CAR | | TFSDYYMSWIRQAPGKGLEWVSYISSSGSTIYYADSVKGRFTISRDNA |
| | | KNSLYLQMNSLRAEDTAVYYCARESGDGMDVWGQGTTVTVSSASGGGG |
| | | SGGRASGGGGSDIQMTQSPSSLSASVGDRVTITCRASQSISSYLNWYQ |
| | | QKPGKAPKLLIYAASSLQSGVPSRFSGSGSGTDFTLTISSLQPEDFAT |
| | | YYCQQSYTLAFGQGTKVDIKTTTPAPRPPTPAPTIASQPLSLRPEACR |
| | | PAAGGAVHTRGLDFACDIYIWAPLAGTCGVLLLSLVITLYCKRGRKKL |
| | | LYIFKQPFMRPVQTTQEEDGCSCRFPEEEEGGCELRVKFSRSADAPAY |
| | | KQGQNQLYNELNLGRREEYDVLDKRRGRDPEMGGKPRRKNPQEGLYNE |
| | | LQKDKMAEAYSEIGMKGERRRGKGHDGLYQGLSTATKDTYDALHMQAL |
| | | PPR |
| 139108- nt | 359 | ATGGCCCTCCCTGTCACCGCCCTGCTGCTTCCGCTGGCTCTTCTGCTC |
| Full CAR | | CACGCCGCTCGGCCCCAAGTGCAACTCGTGGAATCTGGTGGAGGACTC |
| | | GTGAAACCTGGAGGATCATTGAGACTGTCATGCGCGGCCTCGGGATTC |
| | | ACGTTCTCCGATTACTACATGAGCTGGATTCGCCAGGCTCCGGGGAAG |
| | | GGACTGGAATGGGTGTCCTACATTTCCTCATCCGGCTCCACCATCTAC |
| | | TACGCGGACTCCGTGAAGGGGAGATTCACCATTAGCCGCGATAACGCC |
| | | AAGAACAGCCTGTACCTTCAGATGAACTCCCTGCGGGCTGAAGATACT |
| | | GCCGTCTACTACTGCGCAAGGGAGAGCGGAGATGGGATGGACGTCTGG |
| | | GGACAGGGTACCACTGTGACCGTGTCGTCGGCCTCCGGCGGAGGGGGT |
| | | TCGGGTGGAAGGGCCAGCGGCGGCGGAGGCAGCGACATCCAGATGACC |
| | | CAGTCCCCCTCATCGCTGTCCGCCTCCGTGGGCGACCGCGTCACCATC |
| | | ACATGCCGGGCCTCACAGTCGATCTCCTCCTACCTCAATTGGTATCAG |
| | | CAGAAGCCCGGAAAGGCCCCTAAGCTTCTGATCTACGCAGCGTCCTCC |
| | | CTGCAATCCGGGGTCCCATCTCGGTTCTCCGGCTCGGGCAGCGGTACC |
| | | GACTTCACTCTGACCATCTCGAGCCTGCAGCCGGAGGACTTCGCCACT |
| | | TACTACTGTCAGCAAAGCTACACCCTCGCGTTTGGCCAGGGCACCAAA |
| | | GTGGACATCAAGACCACTACCCCAGCACCGAGGCCACCCACCCCGGCT |
| | | CCTACCATCGCCTCCCAGCCTCTGTCCCTGCGTCCGGAGGCATGTAGA |
| | | CCCGCAGCTGGTGGGGCCGTGCATACCCGGGGTCTTGACTTCGCCTGC |
| | | GATATCTACATTTGGGCCCCTCTGGCTGGTACTTGCGGGGTCCTGCTG |
| | | CTTTCACTCGTGATCACTCTTTACTGTAAGCGCGGTCGGAAGAAGCTG |
| | | CTGTACATCTTTAAGCAACCCTTCATGAGGCCTGTGCAGACTACTCAA |
| | | GAGGAGGACGGCTGTTCATGCCGGTTCCCAGAGGAGGAGGAAGGCGGC |
| | | TGCGAACTGCGCGTGAAATTCAGCCGCAGCGCAGATGCTCCAGCCTAC |
| | | AAGCAGGGGCAGAACCAGCTCTACAACGAACTCAATCTTGGTCGGAGA |
| | | GAGGAGTACGACGTGCTGGACAAGCGGAGAGGACGGGACCCAGAAATG |
| | | GGCGGGAAGCCGCGCAGAAAGAATCCCCAAGAGGGCCTGTACAACGAG |
| | | CTCCAAAAGGATAAGATGGCAGAAGCCTATAGCGAGATTGGTATGAAA |
| | | GGGGAACGCAGAAGAGGCAAAGGCCACGACGGACTGTACCAGGGACTC |
| | | AGCACCGCCACCAAGGACACCTATGACGCTCTTCACATGCAGGCCCTG |
| | | CCGCCTCGG |

139110

| | | |
|---|---|---|
| 139110- aa | 360 | QVQLVQSGGGLVKPGGSLRLSCAASGFTFSDYYMSWIRQAPGKGLEWV |
| ScFv | | SYISSSGNTIYYADSVKGRFTISRDNAKNSLYLQMNSLRAEDTAVYYC |
| domain | | ARSTMVREDYWGQGTLVTVSSASGGGGSGGRASGGGGSDIVLTQSPLS |
| | | LPVTLGQPASISCKSSESLVHNSGKTYLNWFHQRPGQSPRRLIYEVSN |
| | | RDSGVPDRFTGSGSGTDFTLKISRVEAEDVGVYYCMQGTHWPGTFGQG |
| | | TKLEIK |
| 139110- nt | 361 | CAAGTGCAACTGGTGCAAAGCGGAGGAGGATTGGTCAAACCCGGAGGA |
| ScFv | | AGCCTGAGACTGTCATGCGCGGCCTCTGGATTCACCTTCTCCGATTAC |
| domain | | TACATGTCATGGATCAGACAGGCCCCGGGGAAGGGCCTCGAATGGGTG |
| | | TCCTACATCTCGTCCTCCGGGAACACCATCTACTACGCCGACAGCGTG |
| | | AAGGGCCGCTTTACCATTTCCCGCGACAACGCAAAGAACTCGCTGTAC |
| | | CTTCAGATGAATTCCCTGCGGGCTGAAGATACCGCGGTGTACTATTGC |
| | | GCCCGGTCCACTATGGTCCGGGAGGACTACTGGGGACAGGGCACACTC |
| | | GTGACCGTGTCCAGCGCGAGCGGGGGTGGAGGCAGCGGTGGACGCGCC |
| | | TCCGGCGGCGGCGGTTCAGACATCGTGCTGACTCAGTCGCCCCTGTCG |
| | | CTGCCGGTCACCCTGGGCCAACCGGCCTCAATTAGCTGCAAGTCCTCG |
| | | GAGAGCCTGGTGCACAACTCAGGAAAGACTTACCTGAACTGGTTCCAT |
| | | CAGCGGCCTGGACAGTCCCCACGGAGGCTCATCTATGAAGTGTCCAAC |
| | | AGGGATTCGGGGGTGCCCGACCGCTTCACTGGCTCCGGGTCCGGCACC |
| | | GACTTCACCTTGAAAATCTCCAGAGTGGAAGCCGAGGACGTGGGCGTG |
| | | TACTACTGTATGCAGGGTACCCACTGGCCTGGAACCTTTGGACAAGGA |
| | | ACTAAGCTCGAGATTAAG |
| 139110- aa | 362 | QVQLVQSGGGLVKPGGSLRLSCAASGFTFSDYYMSWIRQAPGKGLEWV |
| VH | | SYISSSGNTIYYADSVKGRFTISRDNAKNSLYLQMNSLRAEDTAVYYC |
| | | ARSTMVREDYWGQGTLVTVSS |
| 139110- aa | 363 | DIVLTQSPLSLPVTLGQPASISCKSSESLVHNSGKTYLNWFHQRPGQS |
| VL | | PRRLIYEVSNRDSGVPDRFTGSGSGTDFTLKISRVEAEDVGVYYCMQG |
| | | THWPGTFGQGTKLEIK |
| 139110- aa | 364 | MALPVTALLLPLALLLHAARPQVQLVQSGGGLVKPGGSLRLSCAASGF |
| Full CAR | | TFSDYYMSWIRQAPGKGLEWVSYISSSGNTIYYADSVKGRFTISRDNA |
| | | KNSLYLQMNSLRAEDTAVYYCARSTMVREDYWGQGTLVTVSSASGGGG |
| | | SGGRASGGGGSDIVLTQSPLSLPVTLGQPASISCKSSESLVHNSGKTY |
| | | LNWFHQRPGQSPRRLIYEVSNRDSGVPDRFTGSGSGTDFTLKISRVEA |
| | | EDVGVYYCMQGTHWPGTFGQGTKLEIKTTTPAPRPPTPAPTIASQPLS |
| | | LRPEACRPAAGGAVHTRGLDFACDIYIWAPLAGTCGVLLLSLVITLYC |
| | | KRGRKKLLYIFKQPFMRPVQTTQEEDGCSCRFPEEEEGGCELRVKFSR |
| | | SADAPAYKQGQNQLYNELNLGRREEYDVLDKRRGRDPEMGGKPRRKNP |
| | | QEGLYNELQKDKMAEAYSEIGMKGERRRGKGHDGLYQGLSTATKDTYD |
| | | ALHMQALPPR |
| 139110- nt | 365 | ATGGCCCTCCCTGTCACCGCCCTGCTGCTTCCGCTGGCTCTTCTGCTC |
| Full CAR | | CACGCCGCTCGGCCCCAAGTGCAACTGGTGCAAAGCGGAGGAGGATTG |
| | | GTCAAACCCGGAGGAAGCCTGAGACTGTCATGCGCGGCCTCTGGATTC |
| | | ACCTTCTCCGATTACTACATGTCATGGATCAGACAGGCCCCGGGGAAG |
| | | GGCCTCGAATGGGTGTCCTACATCTCGTCCTCCGGGAACACCATCTAC |
| | | TACGCCGACAGCGTGAAGGGCCGCTTTACCATTTCCCGCGACAACGCA |
| | | AAGAACTCGCTGTACCTTCAGATGAATTCCCTGCGGGCTGAAGATACC |
| | | GCGGTGTACTATTGCGCCCGGTCCACTATGGTCCGGGAGGACTACTGG |
| | | GGACAGGGCACACTCGTGACCGTGTCCAGCGCGAGCGGGGGTGGAGGC |
| | | AGCGGTGGACGCGCCTCCGGCGGCGGCGGTTCAGACATCGTGCTGACT |
| | | CAGTCGCCCCTGTCGCTGCCGGTCACCCTGGGCCAACCGGCCTCAATT |
| | | AGCTGCAAGTCCTCGGAGAGCCTGGTGCACAACTCAGGAAAGACTTAC |
| | | CTGAACTGGTTCCATCAGCGGCCTGGACAGTCCCCACGGAGGCTCATC |
| | | TATGAAGTGTCCAACAGGGATTCGGGGGTGCCCGACCGCTTCACTGGC |
| | | TCCGGGTCCGGCACCGACTTCACCTTGAAAATCTCCAGAGTGGAAGCC |
| | | GAGGACGTGGGCGTGTACTACTGTATGCAGGGTACCCACTGGCCTGGA |
| | | ACCTTTGGACAAGGAACTAAGCTCGAGATTAAGACCACTACCCCAGCA |
| | | CCGAGGCCACCCACCCCGGCTCCTACCATCGCCTCCCAGCCTCTGTCC |
| | | CTGCGTCCGGAGGCATGTAGACCCGCAGCTGGTGGGGCCGTGCATACC |
| | | CGGGGTCTTGACTTCGCCTGCGATATCTACATTTGGGCCCCTCTGGCT |
| | | GGTACTTGCGGGGTCCTGCTGCTTTCACTCGTGATCACTCTTTACTGT |
| | | AAGCGCGGTCGGAAGAAGCTGCTGTACATCTTTAAGCAACCCTTCATG |
| | | AGGCCTGTGCAGACTACTCAAGAGGAGGACGGCTGTTCATGCCGGTTC |
| | | CCAGAGGAGGAGGAAGGCGGCTGCGAACTGCGCGTGAAATTCAGCCGC |
| | | AGCGCAGATGCTCCAGCCTACAAGCAGGGGCAGAACCAGCTCTACAAC |
| | | GAACTCAATCTTGGTCGGAGAGAGGAGTACGACGTGCTGGACAAGCGG |
| | | AGAGGACGGGACCCAGAAATGGGCGGGAAGCCGCGCAGAAAGAATCCC |
| | | CAAGAGGGCCTGTACAACGAGCTCCAAAAGGATAAGATGGCAGAAGCC |
| | | TATAGCGAGATTGGTATGAAAGGGGAACGCAGAAGAGGCAAAGGCCAC |
| | | GACGGACTGTACCAGGGACTCAGCACCGCCACCAAGGACACCTATGAC |
| | | GCTCTTCACATGCAGGCCCTGCCGCCTCGG |

139112

| | | |
|---|---|---|
| 139112- aa | 366 | QVQLVESGGGLVQPGGSLRLSCAVSGFALSNHGMSWVRRAPGKGLEWV |
| ScFv | | SGIVYSGSTYYAASVKGRFTISRDNSRNTLYLQMNSLRPEDTAIYYCS |
| domain | | AHGGESDVWGQGTTVTVSSASGGGGSGGRASGGGGSDIRLTQSPSPLS |
| | | ASVGDRVTITCQASEDINKFLNWYHQTPGKAPKLLIYDASTLQTGVPS |
| | | RFSGSGSGTDFTLTINSLQPEDIGTYYCQQYESLPLTFGGGTKVEIK |
| 139112- nt | 367 | CAAGTGCAACTCGTGGAATCTGGTGGAGGACTCGTGCAACCCGGTGGA |
| ScFv | | AGCCTTAGGCTGTCGTGCGCCGTCAGCGGGTTTGCTCTGAGCAACCAT |
| domain | | GGAATGTCCTGGGTCCGCCGGGCACCGGGAAAAGGGCTGGAATGGGTG |
| | | TCCGGCATCGTGTACAGCGGGTCAACCTATTACGCCGCGTCCGTGAAG |
| | | GGCAGATTCACTATCTCAAGAGACAACAGCCGGAACACCCTGTACTTG |
| | | CAAATGAATTCCCTGCGCCCCGAGGACACCGCCATCTACTACTGCTCC |
| | | GCCCACGGAGGAGAGTCGGACGTGTGGGGCCAGGGAACGACTGTGACT |
| | | GTGTCCAGCGCATCAGGAGGGGGTGGTTCGGGCGGCCGGGCCTCGGGG |
| | | GGAGGAGGTTCCGACATTCGGCTGACCCAGTCCCCGTCCCCACTGTCG |
| | | GCCTCCGTCGGCGACCGCGTGACCATCACTTGTCAGGCGTCCGAGGAC |
| | | ATTAACAAGTTCCTGAACTGGTACCACCAGACCCCTGGAAAGGCCCCC |
| | | AAGCTGCTGATCTACGATGCCTCGACCCTTCAAACTGGAGTGCCTAGC |
| | | CGGTTCTCCGGGTCCGGCTCCGGCACTGATTTCACTCTGACCATCAAC |
| | | TCATTGCAGCCGGAAGATATCGGGACCTACTATTGCCAGCAGTACGAA |
| | | TCCCTCCCGCTCACATTCGGCGGGGGAACCAAGGTCGAGATTAAG |
| 139112- aa | 368 | QVQLVESGGGLVQPGGSLRLSCAVSGFALSNHGMSWVRRAPGKGLEWV |
| VH | | SGIVYSGSTYYAASVKGRFTISRDNSRNTLYLQMNSLRPEDTAIYYCS |
| | | AHGGESDVWGQGTTVTVSS |
| 139112- aa | 369 | DIRLTQSPSPLSASVGDRVTITCQASEDINKFLNWYHQTPGKAPKLLI |
| VL | | YDASTLQTGVPSRFSGSGSGTDFTLTINSLQPEDIGTYYCQQYESLPL |
| | | TFGGGTKVEIK |
| 139112- aa | 370 | MALPVTALLLPLALLLHAARPQVQLVESGGGLVQPGGSLRLSCAVSGF |
| Full CAR | | ALSNHGMSWVRRAPGKGLEWVSGIVYSGSTYYAASVKGRFTISRDNSR |
| | | NTLYLQMNSLRPEDTAIYYCSAHGGESDVWGQGTTVTVSSASGGGGSG |
| | | GRASGGGGSDIRLTQSPSPLSASVGDRVTITCQASEDINKFLNWYHQT |
| | | PGKAPKLLIYDASTLQTGVPSRFSGSGSGTDFTLTINSLQPEDIGTYY |
| | | CQQYESLPLTFGGGTKVEIKTTTPAPRPPTPAPTIASQPLSLRPEACR |
| | | PAAGGAVHTRGLDFACDIYIWAPLAGTCGVLLLSLVITLYCKRGRKKL |
| | | LYIFKQPFMRPVQTTQEEDGCSCRFPEEEEGGCELRVKFSRSADAPAY |
| | | KQGQNQLYNELNLGRREEYDVLDKRRGRDPEMGGKPRRKNPQEGLYNE |
| | | LQKDKMAEAYSEIGMKGERRRGKGHDGLYQGLSTATKDTYDALHMQAL |
| | | PPR |
| 139112- nt | 371 | ATGGCCCTCCCTGTCACCGCCCTGCTGCTTCCGCTGGCTCTTCTGCTC |
| Full CAR | | CACGCCGCTCGGCCCCAAGTGCAACTCGTGGAATCTGGTGGAGGACTC |
| | | GTGCAACCCGGTGGAAGCCTTAGGCTGTCGTGCGCCGTCAGCGGGTTT |
| | | GCTCTGAGCAACCATGGAATGTCCTGGGTCCGCCGGGCACCGGGAAAA |
| | | GGGCTGGAATGGGTGTCCGGCATCGTGTACAGCGGGTCAACCTATTAC |
| | | GCCGCGTCCGTGAAGGGCAGATTCACTATCTCAAGAGACAACAGCCGG |
| | | AACACCCTGTACTTGCAAATGAATTCCCTGCGCCCCGAGGACACCGCC |
| | | ATCTACTACTGCTCCGCCCACGGAGGAGAGTCGGACGTGTGGGGCCAG |
| | | GGAACGACTGTGACTGTGTCCAGCGCATCAGGAGGGGGTGGTTCGGGC |
| | | GGCCGGGCCTCGGGGGGAGGAGGTTCCGACATTCGGCTGACCCAGTCC |
| | | CCGTCCCCACTGTCGGCCTCCGTCGGCGACCGCGTGACCATCACTTGT |
| | | CAGGCGTCCGAGGACATTAACAAGTTCCTGAACTGGTACCACCAGACC |
| | | CCTGGAAAGGCCCCCAAGCTGCTGATCTACGATGCCTCGACCCTTCAA |
| | | ACTGGAGTGCCTAGCCGGTTCTCCGGGTCCGGCTCCGGCACTGATTTC |
| | | ACTCTGACCATCAACTCATTGCAGCCGGAAGATATCGGGACCTACTAT |
| | | TGCCAGCAGTACGAATCCCTCCCGCTCACATTCGGCGGGGGAACCAAG |
| | | GTCGAGATTAAGACCACTACCCCAGCACCGAGGCCACCCACCCCGGCT |
| | | CCTACCATCGCCTCCCAGCCTCTGTCCCTGCGTCCGGAGGCATGTAGA |
| | | CCCGCAGCTGGTGGGGCCGTGCATACCCGGGGTCTTGACTTCGCCTGC |
| | | GATATCTACATTTGGGCCCCTCTGGCTGGTACTTGCGGGGTCCTGCTG |
| | | CTTTCACTCGTGATCACTCTTTACTGTAAGCGCGGTCGGAAGAAGCTG |
| | | CTGTACATCTTTAAGCAACCCTTCATGAGGCCTGTGCAGACTACTCAA |
| | | GAGGAGGACGGCTGTTCATGCCGGTTCCCAGAGGAGGAGGAAGGCGGC |
| | | TGCGAACTGCGCGTGAAATTCAGCCGCAGCGCAGATGCTCCAGCCTAC |
| | | AAGCAGGGGCAGAACCAGCTCTACAACGAACTCAATCTTGGTCGGAGA |
| | | GAGGAGTACGACGTGCTGGACAAGCGGAGAGGACGGGACCCAGAAATG |
| | | GGCGGGAAGCCGCGCAGAAAGAATCCCCAAGAGGGCCTGTACAACGAG |
| | | CTCCAAAAGGATAAGATGGCAGAAGCCTATAGCGAGATTGGTATGAAA |
| | | GGGGAACGCAGAAGAGGCAAAGGCCACGACGGACTGTACCAGGGACTC |
| | | AGCACCGCCACCAAGGACACCTATGACGCTCTTCACATGCAGGCCCTG |
| | | CCGCCTCGG |

139113

| | | |
|---|---|---|
| 139113- aa | 372 | EVQLVETGGGLVQPGGSLRLSCAVSGFALSNHGMSWVRRAPGKGLEWV |
| ScFv | | SGIVYSGSTYYAASVKGRFTISRDNSRNTLYLQMNSLRPEDTAIYYCS |
| domain | | AHGGESDVWGQGTTVTVSSASGGGGSGGRASGGGGSETTLTQSPATLS |
| | | VSPGERATLSCRASQSVGSNLAWYQQKPGQGPRLLIYGASTRATGIPA |
| | | RFSGSGSGTEFTLTISSLQPEDFAVYYCQQYNDWLPVTFGQGTKVEIK |
| 139113- nt | 373 | GAAGTGCAATTGGTGGAAACTGGAGGAGGACTTGTGCAACCTGGAGGA |
| ScFv | | TCATTGCGGCTCTCATGCGCTGTCTCCGGCTTCGCCCTGTCAAATCAC |
| domain | | GGGATGTCGTGGGTCAGACGGGCCCCGGGAAAGGGTCTGGAATGGGTG |
| | | TCGGGGATTGTGTACAGCGGCTCCACCTACTACGCCGCTTCGGTCAAG |
| | | GGCCGCTTCACTATTTCACGGGACAACAGCCGCAACACCCTCTATCTG |
| | | CAAATGAACTCTCTCCGCCCGGAGGATACCGCCATCTACTACTGCTCC |
| | | GCACACGGCGGCGAATCCGACGTGTGGGGACAGGGAACCACTGTCACC |
| | | GTGTCGTCCGCATCCGGTGGCGGAGGATCGGGTGGCCGGGCCTCCGGG |
| | | GGCGGCGGCAGCGAGACTACCCTGACCCAGTCCCCTGCCACTCTGTCC |
| | | GTGAGCCCGGGAGAGAGAGCCACCCTTAGCTGCCGGGCCAGCCAGAGC |
| | | GTGGGCTCCAACCTGGCCTGGTACCAGCAGAAGCCAGGACAGGGTCCC |
| | | AGGCTGCTGATCTACGGAGCCTCCACTCGCGCGACCGGCATCCCCGCG |
| | | AGGTTCTCCGGGTCGGGTTCCGGGACCGAGTTCACCCTGACCATCTCC |
| | | TCCCTCCAACCGGAGGACTTCGCGGTGTACTACTGTCAGCAGTACAAC |
| | | GATTGGCTGCCCGTGACATTTGGACAGGGGACGAAGGTGGAAATCAAA |
| 139113- aa | 374 | EVQLVETGGGLVQPGGSLRLSCAVSGFALSNHGMSWVRRAPGKGLEWV |
| VH | | SGIVYSGSTYYAASVKGRFTISRDNSRNTLYLQMNSLRPEDTAIYYCS |
| | | AHGGESDVWGQGTTVTVSS |
| 139113- aa | 375 | ETTLTQSPATLSVSPGERATLSCRASQSVGSNLAWYQQKPGQGPRLLI |
| VL | | YGASTRATGIPARFSGSGSGTEFTLTISSLQPEDFAVYYCQQYNDWLP |
| | | VTFGQGTKVEIK |
| 139113- aa | 376 | MALPVTALLLPLALLLHAARPEVQLVETGGGLVQPGGSLRLSCAVSGF |
| Full CAR | | ALSNHGMSWVRRAPGKGLEWVSGIVYSGSTYYAASVKGRFTISRDNSR |
| | | NTLYLQMNSLRPEDTAIYYCSAHGGESDVWGQGTTVTVSSASGGGGSG |
| | | GRASGGGGSETTLTQSPATLSVSPGERATLSCRASQSVGSNLAWYQQK |
| | | PGQGPRLLIYGASTRATGIPARFSGSGSGTEFTLTISSLQPEDFAVYY |
| | | CQQYNDWLPVTFGQGTKVEIKTTTPAPRPPTPAPTIASQPLSLRPEAC |
| | | RPAAGGAVHTRGLDFACDIYIWAPLAGTCGVLLLSLVITLYCKRGRKK |
| | | LLYIFKQPFMRPVQTTQEEDGCSCRFPEEEEGGCELRVKFSRSADAPA |
| | | YKQGQNQLYNELNLGRREEYDVLDKRRGRDPEMGGKPRRKNPQEGLYN |
| | | ELQKDKMAEAYSEIGMKGERRRGKGHDGLYQGLSTATKDTYDALHMQA |
| | | LPPR |
| 139113- nt | 377 | ATGGCCCTCCCTGTCACCGCCCTGCTGCTTCCGCTGGCTCTTCTGCTC |
| Full CAR | | CACGCCGCTCGGCCCGAAGTGCAATTGGTGGAAACTGGAGGAGGACTT |
| | | GTGCAACCTGGAGGATCATTGCGGCTCTCATGCGCTGTCTCCGGCTTC |
| | | GCCCTGTCAAATCACGGGATGTCGTGGGTCAGACGGGCCCCGGGAAAG |
| | | GGTCTGGAATGGGTGTCGGGGATTGTGTACAGCGGCTCCACCTACTAC |
| | | GCCGCTTCGGTCAAGGGCCGCTTCACTATTTCACGGGACAACAGCCGC |
| | | AACACCCTCTATCTGCAAATGAACTCTCTCCGCCCGGAGGATACCGCC |
| | | ATCTACTACTGCTCCGCACACGGCGGCGAATCCGACGTGTGGGGACAG |
| | | GGAACCACTGTCACCGTGTCGTCCGCATCCGGTGGCGGAGGATCGGGT |
| | | GGCCGGGCCTCCGGGGGCGGCGGCAGCGAGACTACCCTGACCCAGTCC |
| | | CCTGCCACTCTGTCCGTGAGCCCGGGAGAGAGAGCCACCCTTAGCTGC |
| | | CGGGCCAGCCAGAGCGTGGGCTCCAACCTGGCCTGGTACCAGCAGAAG |
| | | CCAGGACAGGGTCCCAGGCTGCTGATCTACGGAGCCTCCACTCGCGCG |
| | | ACCGGCATCCCCGCGAGGTTCTCCGGGTCGGGTTCCGGGACCGAGTTC |
| | | ACCCTGACCATCTCCTCCCTCCAACCGGAGGACTTCGCGGTGTACTAC |
| | | TGTCAGCAGTACAACGATTGGCTGCCCGTGACATTTGGACAGGGGACG |
| | | AAGGTGGAAATCAAAACCACTACCCCAGCACCGAGGCCACCCACCCCG |
| | | GCTCCTACCATCGCCTCCCAGCCTCTGTCCCTGCGTCCGGAGGCATGT |
| | | AGACCCGCAGCTGGTGGGGCCGTGCATACCCGGGGTCTTGACTTCGCC |
| | | TGCGATATCTACATTTGGGCCCCTCTGGCTGGTACTTGCGGGGTCCTG |
| | | CTGCTTTCACTCGTGATCACTCTTTACTGTAAGCGCGGTCGGAAGAAG |
| | | CTGCTGTACATCTTTAAGCAACCCTTCATGAGGCCTGTGCAGACTACT |
| | | CAAGAGGAGGACGGCTGTTCATGCCGGTTCCCAGAGGAGGAGGAAGGC |
| | | GGCTGCGAACTGCGCGTGAAATTCAGCCGCAGCGCAGATGCTCCAGCC |
| | | TACAAGCAGGGGCAGAACCAGCTCTACAACGAACTCAATCTTGGTCGG |
| | | AGAGAGGAGTACGACGTGCTGGACAAGCGGAGAGGACGGGACCCAGAA |
| | | ATGGGCGGGAAGCCGCGCAGAAAGAATCCCCAAGAGGGCCTGTACAAC |
| | | GAGCTCCAAAAGGATAAGATGGCAGAAGCCTATAGCGAGATTGGTATG |
| | | AAAGGGGAACGCAGAAGAGGCAAAGGCCACGACGGACTGTACCAGGGA |
| | | CTCAGCACCGCCACCAAGGACACCTATGACGCTCTTCACATGCAGGCC |
| | | CTGCCGCCTCGG |

139114

| | | |
|---|---|---|
| 139114- aa | 378 | EVQLVESGGGLVQPGGSLRLSCAVSGFALSNHGMSWVRRAPGKGLEWV |
| ScFv | | SGIVYSGSTYYAASVKGRFTISRDNSRNTLYLQMNSLRPEDTAIYYCS |
| domain | | AHGGESDVWGQGTTVTVSSASGGGGSGGRASGGGGSEIVLTQSPGTLS |
| | | LSPGERATLSCRASQSIGSSSLAWYQQKPGQAPRLLMYGASSRASGIP |
| | | DRFSGSGSGTDFTLTISRLEPEDFAVYYCQQYAGSPPFTFGQGTKVEI |
| | | K |
| 139114- nt | 379 | GAAGTGCAATTGGTGGAATCTGGTGGAGGACTTGTGCAACCTGGAGGA |
| ScFv | | TCACTGAGACTGTCATGCGCGGTGTCCGGTTTTGCCCTGAGCAATCAT |
| domain | | GGGATGTCGTGGGTCCGGCGCGCCCCCGGAAAGGGTCTGGAATGGGTG |
| | | TCGGGTATCGTCTACTCCGGGAGCACTTACTACGCCGCGAGCGTGAAG |
| | | GGCCGCTTCACCATTTCCCGCGATAACTCCCGCAACACCCTGTACTTG |
| | | CAAATGAACTCGCTCCGGCCTGAGGACACTGCCATCTACTACTGCTCC |
| | | GCACACGGAGGAGAATCCGACGTGTGGGGCCAGGGAACTACCGTGACC |
| | | GTCAGCAGCGCCTCCGGCGGCGGGGGCTCAGGCGGACGGGCTAGCGGC |
| | | GGCGGTGGCTCCGAGATCGTGCTGACCCAGTCGCCTGGCACTCTCTCG |
| | | CTGAGCCCCGGGGAAAGGGCAACCCTGTCCTGTCGGGCCAGCCAGTCC |
| | | ATTGGATCATCCTCCCTCGCCTGGTATCAGCAGAAACCGGGACAGGCT |
| | | CCGCGGCTGCTTATGTATGGGGCCAGCTCAAGAGCCTCCGGCATTCCC |
| | | GACCGGTTCTCCGGGTCCGGTTCCGGCACCGATTTCACCCTGACTATC |
| | | TCGAGGCTGGAGCCAGAGGACTTCGCCGTGTACTACTGCCAGCAGTAC |
| | | GCGGGGTCCCCGCCGTTCACGTTCGGACAGGGAACCAAGGTCGAGATC |
| | | AAG |
| 139114- aa | 380 | EVQLVESGGGLVQPGGSLRLSCAVSGFALSNHGMSWVRRAPGKGLEWV |
| VH | | SGIVYSGSTYYAASVKGRFTISRDNSRNTLYLQMNSLRPEDTAIYYCS |
| | | AHGGESDVWGQGTTVTVSS |
| 139114- aa | 381 | EIVLTQSPGTLSLSPGERATLSCRASQSIGSSSLAWYQQKPGQAPRLL |
| VL | | MYGASSRASGIPDRFSGSGSGTDFTLTISRLEPEDFAVYYCQQYAGSP |
| | | PFTFGQGTKVEIK |
| 139114- aa | 382 | MALPVTALLLPLALLLHAARPEVQLVESGGGLVQPGGSLRLSCAVSGF |
| Full CAR | | ALSNHGMSWVRRAPGKGLEWVSGIVYSGSTYYAASVKGRFTISRDNSR |
| | | NTLYLQMNSLRPEDTAIYYCSAHGGESDVWGQGTTVTVSSASGGGGSG |
| | | GRASGGGGSEIVLTQSPGTLSLSPGERATLSCRASQSIGSSSLAWYQQ |
| | | KPGQAPRLLMYGASSRASGIPDRFSGSGSGTDFTLTISRLEPEDFAVY |
| | | YCQQYAGSPPFTFGQGTKVEIKTTTPAPRPPTPAPTIASQPLSLRPEA |
| | | CRPAAGGAVHTRGLDFACDIYIWAPLAGTCGVLLLSLVITLYCKRGRK |
| | | KLLYIFKQPFMRPVQTTQEEDGCSCRFPEEEEGGCELRVKFSRSADAP |
| | | AYKQGQNQLYNELNLGRREEYDVLDKRRGRDPEMGGKPRRKNPQEGLY |
| | | NELQKDKMAEAYSEIGMKGERRRGKGHDGLYQGLSTATKDTYDALHMQ |
| | | ALPPR |
| 139114- nt | 383 | ATGGCCCTCCCTGTCACCGCCCTGCTGCTTCCGCTGGCTCTTCTGCTC |
| Full CAR | | CACGCCGCTCGGCCCGAAGTGCAATTGGTGGAATCTGGTGGAGGACTT |
| | | GTGCAACCTGGAGGATCACTGAGACTGTCATGCGCGGTGTCCGGTTTT |
| | | GCCCTGAGCAATCATGGGATGTCGTGGGTCCGGCGCGCCCCCGGAAAG |
| | | GGTCTGGAATGGGTGTCGGGTATCGTCTACTCCGGGAGCACTTACTAC |
| | | GCCGCGAGCGTGAAGGGCCGCTTCACCATTTCCCGCGATAACTCCCGC |
| | | AACACCCTGTACTTGCAAATGAACTCGCTCCGGCCTGAGGACACTGCC |
| | | ATCTACTACTGCTCCGCACACGGAGGAGAATCCGACGTGTGGGGCCAG |
| | | GGAACTACCGTGACCGTCAGCAGCGCCTCCGGCGGCGGGGGCTCAGGC |
| | | GGACGGGCTAGCGGCGGCGGTGGCTCCGAGATCGTGCTGACCCAGTCG |
| | | CCTGGCACTCTCTCGCTGAGCCCCGGGGAAAGGGCAACCCTGTCCTGT |
| | | CGGGCCAGCCAGTCCATTGGATCATCCTCCCTCGCCTGGTATCAGCAG |
| | | AAACCGGGACAGGCTCCGCGGCTGCTTATGTATGGGGCCAGCTCAAGA |
| | | GCCTCCGGCATTCCCGACCGGTTCTCCGGGTCCGGTTCCGGCACCGAT |
| | | TTCACCCTGACTATCTCGAGGCTGGAGCCAGAGGACTTCGCCGTGTAC |
| | | TACTGCCAGCAGTACGCGGGGTCCCCGCCGTTCACGTTCGGACAGGGA |
| | | ACCAAGGTCGAGATCAAGACCACTACCCCAGCACCGAGGCCACCCACC |
| | | CCGGCTCCTACCATCGCCTCCCAGCCTCTGTCCCTGCGTCCGGAGGCA |
| | | TGTAGACCCGCAGCTGGTGGGGCCGTGCATACCCGGGGTCTTGACTTC |
| | | GCCTGCGATATCTACATTTGGGCCCCTCTGGCTGGTACTTGCGGGGTC |
| | | CTGCTGCTTTCACTCGTGATCACTCTTTACTGTAAGCGCGGTCGGAAG |
| | | AAGCTGCTGTACATCTTTAAGCAACCCTTCATGAGGCCTGTGCAGACT |
| | | ACTCAAGAGGAGGACGGCTGTTCATGCCGGTTCCCAGAGGAGGAGGAA |
| | | GGCGGCTGCGAACTGCGCGTGAAATTCAGCCGCAGCGCAGATGCTCCA |
| | | GCCTACAAGCAGGGGCAGAACCAGCTCTACAACGAACTCAATCTTGGT |
| | | CGGAGAGAGGAGTACGACGTGCTGGACAAGCGGAGAGGACGGGACCCA |
| | | GAAATGGGCGGGAAGCCGCGCAGAAAGAATCCCCAAGAGGGCCTGTAC |
| | | AACGAGCTCCAAAAGGATAAGATGGCAGAAGCCTATAGCGAGATTGGT |
| | | ATGAAAGGGGAACGCAGAAGAGGCAAAGGCCACGACGGACTGTACCAG |
| | | GGACTCAGCACCGCCACCAAGGACACCTATGACGCTCTTCACATGCAG |
| | | GCCCTGCCGCCTCGG |

149362

| | | |
|---|---|---|
| 149362-aa | 384 | QVQLQESGPGLVKPSETLSLTCTVSGGSISSSYYYWGWIRQPPGKGLE |
| ScFv | | WIGSIYYSGSAYYNPSLKSRVTISVDTSKNQFSLRLSSVTAADTAVYY |
| domain | | CARHWQEWPDAFDIWGQGTMVTVSSGGGGSGGGGSGGGGSETTLTQSP |
| | | AFMSATPGDKVIISCKASQDIDDAMNWYQQKPGEAPLFIIQSATSPVP |
| | | GIPPRFSGSGFGTDFSLTINNIESEDAAYYFCLQHDNFPLTFGQGTKL |
| | | EIK |
| 149362-nt | 385 | CAAGTGCAGCTTCAGGAAAGCGGACCGGGCCTGGTCAAGCCATCCGAA |
| ScFv | | ACTCTCTCCCTGACTTGCACTGTGTCTGGCGGTTCCATCTCATCGTCG |
| domain | | TACTACTACTGGGGCTGGATTAGGCAGCCGCCCGGAAAGGGACTGGAG |
| | | TGGATCGGAAGCATCTACTATTCCGGCTCGGCGTACTACAACCCTAGC |
| | | CTCAAGTCGAGAGTGACCATCTCCGTGGATACCTCCAAGAACCAGTTT |
| | | TCCCTGCGCCTGAGCTCCGTGACCGCCGCTGACACCGCCGTGTACTAC |
| | | TGTGCTCGGCATTGGCAGGAATGGCCCGATGCCTTCGACATTTGGGGC |
| | | CAGGGCACTATGGTCACTGTGTCATCCGGGGGTGGAGGCAGCGGGGGA |
| | | GGAGGGTCCGGGGGGGGAGGTTCAGAGACAACCTTGACCCAGTCACCC |
| | | GCATTCATGTCCGCCACTCCGGGAGACAAGGTCATCATCTCGTGCAAA |
| | | GCGTCCCAGGATATCGACGATGCCATGAATTGGTACCAGCAGAAGCCT |
| | | GGCGAAGCGCCGCTGTTCATTATCCAATCCGCAACCTCGCCCGTGCCT |
| | | GGAATCCCACCGCGGTTCAGCGGCAGCGGTTTCGGAACCGACTTTTCC |
| | | CTGACCATTAACAACATTGAGTCCGAGGACGCCGCCTACTACTTCTGC |
| | | CTGCAACACGACAACTTCCCTCTCACGTTCGGCCAGGGAACCAAGCTG |
| | | GAAATCAAG |
| 149362-aa | 386 | QVQLQESGPGLVKPSETLSLTCTVSGGSISSSYYYWGWIRQPPGKGLE |
| VH | | WIGSIYYSGSAYYNPSLKSRVTISVDTSKNQFSLRLSSVTAADTAVYY |
| | | CARHWQEWPDAFDIWGQGTMVTVSS |
| 149362-aa | 387 | ETTLTQSPAFMSATPGDKVIISCKASQDIDDAMNWYQQKPGEAPLFII |
| VL | | QSATSPVPGIPPRFSGSGFGTDFSLTINNIESEDAAYYFCLQHDNFPL |
| | | TFGQGTKLEIK |
| 149362-aa | 388 | MALPVTALLLPLALLLHAARPQVQLQESGPGLVKPSETLSLTCTVSGG |
| Full CAR | | SISSSYYYWGWIRQPPGKGLEWIGSIYYSGSAYYNPSLKSRVTISVDT |
| | | SKNQFSLRLSSVTAADTAVYYCARHWQEWPDAFDIWGQGTMVTVSSGG |
| | | GGSGGGGSGGGGSETTLTQSPAFMSATPGDKVIISCKASQDIDDAMNW |
| | | YQQKPGEAPLFIIQSATSPVPGIPPRFSGSGFGTDFSLTINNIESEDA |
| | | AYYFCLQHDNFPLTFGQGTKLEIKTTTPAPRPPTPAPTIASQPLSLRP |
| | | EACRPAAGGAVHTRGLDFACDIYIWAPLAGTCGVLLLSLVITLYCKRG |
| | | RKKLLYIFKQPFMRPVQTTQEEDGCSCRFPEEEEGGCELRVKFSRSAD |
| | | APAYKQGQNQLYNELNLGRREEYDVLDKRRGRDPEMGGKPRRKNPQEG |
| | | LYNELQKDKMAEAYSEIGMKGERRRGKGHDGLYQGLSTATKDTYDALH |
| | | MQALPPR |
| 149362-nt | 389 | ATGGCCCTCCCTGTCACCGCCCTGCTGCTTCCGCTGGCTCTTCTGCTC |
| Full CAR | | CACGCCGCTCGGCCCCAAGTGCAGCTTCAGGAAAGCGGACCGGGCCTG |
| | | GTCAAGCCATCCGAAACTCTCTCCCTGACTTGCACTGTGTCTGGCGGT |
| | | TCCATCTCATCGTCGTACTACTACTGGGGCTGGATTAGGCAGCCGCCC |
| | | GGAAAGGGACTGGAGTGGATCGGAAGCATCTACTATTCCGGCTCGGCG |
| | | TACTACAACCCTAGCCTCAAGTCGAGAGTGACCATCTCCGTGGATACC |
| | | TCCAAGAACCAGTTTTCCCTGCGCCTGAGCTCCGTGACCGCCGCTGAC |
| | | ACCGCCGTGTACTACTGTGCTCGGCATTGGCAGGAATGGCCCGATGCC |
| | | TTCGACATTTGGGGCCAGGGCACTATGGTCACTGTGTCATCCGGGGGT |
| | | GGAGGCAGCGGGGGAGGAGGGTCCGGGGGGGGAGGTTCAGAGACAACC |
| | | TTGACCCAGTCACCCGCATTCATGTCCGCCACTCCGGGAGACAAGGTC |
| | | ATCATCTCGTGCAAAGCGTCCCAGGATATCGACGATGCCATGAATTGG |
| | | TACCAGCAGAAGCCTGGCGAAGCGCCGCTGTTCATTATCCAATCCGCA |
| | | ACCTCGCCCGTGCCTGGAATCCCACCGCGGTTCAGCGGCAGCGGTTTC |
| | | GGAACCGACTTTTCCCTGACCATTAACAACATTGAGTCCGAGGACGCC |
| | | GCCTACTACTTCTGCCTGCAACACGACAACTTCCCTCTCACGTTCGGC |
| | | CAGGGAACCAAGCTGGAAATCAAGACCACTACCCCAGCACCGAGGCCA |
| | | CCCACCCCGGCTCCTACCATCGCCTCCCAGCCTCTGTCCCTGCGTCCG |
| | | GAGGCATGTAGACCCGCAGCTGGTGGGGCCGTGCATACCCGGGGTCTT |
| | | GACTTCGCCTGCGATATCTACATTTGGGCCCCTCTGGCTGGTACTTGC |
| | | GGGGTCCTGCTGCTTTCACTCGTGATCACTCTTTACTGTAAGCGCGGT |
| | | CGGAAGAAGCTGCTGTACATCTTTAAGCAACCCTTCATGAGGCCTGIG |
| | | CAGACTACTCAAGAGGAGGACGGCTGTTCATGCCGGTTCCCAGAGGAG |
| | | GAGGAAGGCGGCTGCGAACTGCGCGTGAAATTCAGCCGCAGCGCAGAT |
| | | GCTCCAGCCTACAAGCAGGGGCAGAACCAGCTCTACAACGAACTCAAT |
| | | CTTGGTCGGAGAGAGGAGTACGACGTGCTGGACAAGCGGAGAGGACGG |
| | | GACCCAGAAATGGGCGGGAAGCCGCGCAGAAAGAATCCCCAAGAGGGC |
| | | CTGTACAACGAGCTCCAAAAGGATAAGATGGCAGAAGCCTATAGCGAG |
| | | ATTGGTATGAAAGGGGAACGCAGAAGAGGCAAAGGCCACGACGGACTG |
| | | TACCAGGGACTCAGCACCGCCACCAAGGACACCTATGACGCTCTTCAC |
| | | ATGCAGGCCCTGCCGCCTCGG |

149363

| | | |
|---|---|---|
| 149363-aa | 390 | VNLRESGPALVKPTQTLTLTCTFSGFSLRTSGMCVSWIRQPPGKALEW |
| ScFv | | LARIDWDEDKFYSTSLKTRLTISKDTSDNQVVLRMTNMDPADTATYYC |
| domain | | ARSGAGGTSATAFDIWGPGTMVTVSSGGGGSGGGGSGGGGSDIQMTQS |
| | | PSSLSASVGDRVTITCRASQDIYNNLAWFQLKPGSAPRSLMYAANKSQ |
| | | SGVPSRFSGSASGTDFTLTISSLQPEDFATYYCQHYYRFPYSFGQGTK |
| | | LEIK |
| 149363-nt | 391 | CAAGTCAATCTGCGCGAATCCGGCCCCGCCTTGGTCAAGCCTACCCAG |
| ScFv | | ACCCTCACTCTGACCTGTACTTTCTCCGGCTTCTCCCTGCGGACTTCC |
| domain | | GGGATGTGCGTGTCCTGGATCAGACAGCCTCCGGGAAAGGCCCTGGAG |
| | | TGGCTCGCTCGCATTGACTGGGATGAGGACAAGTTCTACTCCACCTCA |
| | | CTCAAGACCAGGCTGACCATCAGCAAAGATACCTCTGACAACCAAGTG |
| | | GTGCTCCGCATGACCAACATGGACCCAGCCGACACTGCCACTTACTAC |
| | | TGCGCGAGGAGCGGAGCGGGCGGAACCTCCGCCACCGCCTTCGATATT |
| | | TGGGGCCCGGGTACCATGGTCACCGTGTCAAGCGGAGGAGGGGGGTCC |
| | | GGGGGCGGCGGTTCCGGGGGAGGCGGATCGGACATTCAGATGACTCAG |
| | | TCACCATCGTCCCTGAGCGCTAGCGTGGGCGACAGAGTGACAATCACT |
| | | TGCCGGGCATCCCAGGACATCTATAACAACCTTGCGTGGTTCCAGCTG |
| | | AAGCCTGGTTCCGCACCGCGGTCACTTATGTACGCCGCCAACAAGAGC |
| | | CAGTCGGGAGTGCCGTCCCGGTTTTCCGGTTCGGCCTCGGGAACTGAC |
| | | TTCACCCTGACGATCTCCAGCCTGCAACCCGAGGATTTCGCCACCTAC |
| | | TACTGCCAGCACTACTACCGCTTTCCCTACTCGTTCGGACAGGGAACC |
| | | AAGCTGGAAATCAAG |
| 149363-aa | 392 | QVNLRESGPALVKPTQTLTLTCTFSGFSLRTSGMCVSWIRQPPGKALE |
| VH | | WLARIDWDEDKFYSTSLKTRLTISKDTSDNQVVLRMTNMDPADTATYY |
| | | CARSGAGGTSATAFDIWGPGTMVTVSS |
| 149363-aa | 393 | DIQMTQSPSSLSASVGDRVTITCRASQDIYNNLAWFQLKPGSAPRSLM |
| VL | | YAANKSQSGVPSRFSGSASGTDFTLTISSLQPEDFATYYCQHYYRFPY |
| | | SFGQGTKLEIK |
| 149363-aa | 394 | MALPVTALLLPLALLLHAARPQVNLRESGPALVKPTQTLTLTCTFSGF |
| Full CAR | | SLRTSGMCVSWIRQPPGKALEWLARIDWDEDKFYSTSLKTRLTISKDT |
| | | SDNQVVLRMTNMDPADTATYYCARSGAGGTSATAFDIWGPGTMVTVSS |
| | | GGGGSGGGGSGGGGSDIQMTQSPSSLSASVGDRVTITCRASQDIYNNL |
| | | AWFQLKPGSAPRSLMYAANKSQSGVPSRFSGSASGTDFTLTISSLQPE |
| | | DFATYYCQHYYRFPYSFGQGTKLEIKTTTPAPRPPTPAPTIASQPLSL |
| | | RPEACRPAAGGAVHTRGLDFACDIYIWAPLAGTCGVLLLSLVITLYCK |
| | | RGRKKLLYIFKQPFMRPVQTTQEEDGCSCRFPEEEEGGCELRVKFSRS |
| | | ADAPAYKQGQNQLYNELNLGRREEYDVLDKRRGRDPEMGGKPRRKNPQ |
| | | EGLYNELQKDKMAEAYSEIGMKGERRRGKGHDGLYQGLSTATKDTYDA |
| | | LHMQALPPR |
| 149363-nt | 395 | ATGGCCCTCCCTGTCACCGCCCTGCTGCTTCCGCTGGCTCTTCTGCTC |
| Full CAR | | CACGCCGCTCGGCCCCAAGTCAATCTGCGCGAATCCGGCCCCGCCTTG |
| | | GTCAAGCCTACCCAGACCCTCACTCTGACCTGTACTTTCTCCGGCTTC |
| | | TCCCTGCGGACTTCCGGGATGTGCGTGTCCTGGATCAGACAGCCTCCG |
| | | GGAAAGGCCCTGGAGTGGCTCGCTCGCATTGACTGGGATGAGGACAAG |
| | | TTCTACTCCACCTCACTCAAGACCAGGCTGACCATCAGCAAAGATACC |
| | | TCTGACAACCAAGTGGTGCTCCGCATGACCAACATGGACCCAGCCGAC |
| | | ACTGCCACTTACTACTGCGCGAGGAGCGGAGCGGGCGGAACCTCCGCC |
| | | ACCGCCTTCGATATTTGGGGCCCGGGTACCATGGTCACCGTGTCAAGC |
| | | GGAGGAGGGGGGTCCGGGGGCGGCGGTTCCGGGGGAGGCGGATCGGAC |
| | | ATTCAGATGACTCAGTCACCATCGTCCCTGAGCGCTAGCGTGGGCGAC |
| | | AGAGTGACAATCACTTGCCGGGCATCCCAGGACATCTATAACAACCTT |
| | | GCGTGGTTCCAGCTGAAGCCTGGTTCCGCACCGCGGTCACTTATGTAC |
| | | GCCGCCAACAAGAGCCAGTCGGGAGTGCCGTCCCGGTTTTCCGGTTCG |
| | | GCCTCGGGAACTGACTTCACCCTGACGATCTCCAGCCTGCAACCCGAG |
| | | GATTTCGCCACCTACTACTGCCAGCACTACTACCGCTTTCCCTACTCG |
| | | TTCGGACAGGGAACCAAGCTGGAAATCAAGACCACTACCCCAGCACCG |
| | | AGGCCACCCACCCCGGCTCCTACCATCGCCTCCCAGCCTCTGTCCCTG |
| | | CGTCCGGAGGCATGTAGACCCGCAGCTGGTGGGGCCGTGCATACCCGG |
| | | GGTCTTGACTTCGCCTGCGATATCTACATTTGGGCCCCTCTGGCTGGT |
| | | ACTTGCGGGGTCCTGCTGCTTTCACTCGTGATCACTCTTTACTGTAAG |
| | | CGCGGTCGGAAGAAGCTGCTGTACATCTTTAAGCAACCCTTCATGAGG |
| | | CCTGTGCAGACTACTCAAGAGGAGGACGGCTGTTCATGCCGGTTCCCA |
| | | GAGGAGGAGGAAGGCGGCTGCGAACTGCGCGTGAAATTCAGCCGCAGC |
| | | GCAGATGCTCCAGCCTACAAGCAGGGGCAGAACCAGCTCTACAACGAA |
| | | CTCAATCTTGGTCGGAGAGAGGAGTACGACGTGCTGGACAAGCGGAGA |
| | | GGACGGGACCCAGAAATGGGCGGGAAGCCGCGCAGAAAGAATCCCCAA |
| | | GAGGGCCTGTACAACGAGCTCCAAAAGGATAAGATGGCAGAAGCCTAT |
| | | AGCGAGATTGGTATGAAAGGGGAACGCAGAAGAGGCAAAGGCCACGAC |
| | | GGACTGTACCAGGGACTCAGCACCGCCACCAAGGACACCTATGACGCT |
| | | CTTCACATGCAGGCCCTGCCGCCTCGG |

149364

| | | |
|---|---|---|
| 149364-aa | 396 | EVQLVESGGGLVKPGGSLRLSCAASGFTFSSYSMNWVRQAPGKGLEWV |
| ScFv | | SSISSSSSYIYYADSVKGRFTISRDNAKNSLYLQMNSLRAEDTAVYYC |
| domain | | AKTIAAVYAFDIWGQGTTVTVSSGGGGSGGGGSGGGGSEIVLTQSPLS |
| | | LPVTPEEPASISCRSSQSLLHSNGYNYLDWYLQKPGQSPQLLIYLGSN |
| | | RASGVPDRFSGSGSGTDFTLKISRVEAEDVGVYYCMQALQTPYTFGQG |
| | | TKLEIK |
| 149364-nt | 397 | GAAGTGCAGCTTGTCGAATCCGGGGGGGGACTGGTCAAGCCGGGCGGA |
| ScFv | | TCACTGAGACTGTCCTGCGCCGCGAGCGGCTTCACGTTCTCCTCCTAC |
| domain | | TCCATGAACTGGGTCCGCCAAGCCCCCGGGAAGGGACTGGAATGGGTG |
| | | TCCTCTATCTCCTCGTCGTCGTCCTACATCTACTACGCCGACTCCGTG |
| | | AAGGGAAGATTCACCATTTCCCGCGACAACGCAAAGAACTCACTGTAC |
| | | TTGCAAATGAACTCACTCCGGGCCGAAGATACTGCTGTGTACTATTGC |
| | | GCCAAGACTATTGCCGCCGTCTACGCTTTCGACATCTGGGGCCAGGGA |
| | | ACCACCGTGACTGTGTCGTCCGGTGGTGGTGGCTCGGGCGGAGGAGGA |
| | | AGCGGCGGCGGGGGGTCCGAGATTGTGCTGACCCAGTCGCCACTGAGC |
| | | CTCCCTGTGACCCCCGAGGAACCCGCCAGCATCAGCTGCCGGTCCAGC |
| | | CAGTCCCTGCTCCACTCCAACGGATACAATTACCTCGATTGGTACCTT |
| | | CAGAAGCCTGGACAAAGCCCGCAGCTGCTCATCTACTTGGGATCAAAC |
| | | CGCGCGTCAGGAGTGCCTGACCGGTTCTCCGGCTCGGGCAGCGGTACC |
| | | GATTTCACCCTGAAAATCTCCAGGGTGGAGGCAGAGGACGTGGGAGTG |
| | | TATTACTGTATGCAGGCGCTGCAGACTCCGTACACATTTGGGCAGGGC |
| | | ACCAAGCTGGAGATCAAG |
| 149364-aa | 398 | EVQLVESGGGLVKPGGSLRLSCAASGFTFSSYSMNWVRQAPGKGLEWV |
| VH | | SSISSSSSYIYYADSVKGRFTISRDNAKNSLYLQMNSLRAEDTAVYYC |
| | | AKTIAAVYAFDIWGQGTTVTVSS |
| 149364-aa | 399 | EIVLTQSPLSLPVTPEEPASISCRSSQSLLHSNGYNYLDWYLQKPGQS |
| VL | | PQLLIYLGSNRASGVPDRFSGSGSGTDFTLKISRVEAEDVGVYYCMQA |
| | | LQTPYTFGQGTKLEIK |
| 149364-aa | 400 | MALPVTALLLPLALLLHAARPEVQLVESGGGLVKPGGSLRLSCAASGF |
| Full CAR | | TFSSYSMNWVRQAPGKGLEWVSSISSSSSYIYYADSVKGRFTISRDNA |
| | | KNSLYLQMNSLRAEDTAVYYCAKTIAAVYAFDIWGQGTTVTVSSGGGG |
| | | SGGGGSGGGGSEIVLTQSPLSLPVTPEEPASISCRSSQSLLHSNGYNY |
| | | LDWYLQKPGQSPQLLIYLGSNRASGVPDRFSGSGSGTDFTLKISRVEA |
| | | EDVGVYYCMQALQTPYTFGQGTKLEIKTTTPAPRPPTPAPTIASQPLS |
| | | LRPEACRPAAGGAVHTRGLDFACDIYIWAPLAGTCGVLLLSLVITLYC |
| | | KRGRKKLLYIFKQPFMRPVQTTQEEDGCSCRFPEEEEGGCELRVKFSR |
| | | SADAPAYKQGQNQLYNELNLGRREEYDVLDKRRGRDPEMGGKPRRKNP |
| | | QEGLYNELQKDKMAEAYSEIGMKGERRRGKGHDGLYQGLSTATKDTYD |
| | | ALHMQALPPR |
| 149364-nt | 401 | ATGGCCCTCCCTGTCACCGCCCTGCTGCTTCCGCTGGCTCTTCTGCTC |
| Full CAR | | CACGCCGCTCGGCCCGAAGTGCAGCTTGTCGAATCCGGGGGGGGACTG |
| | | GTCAAGCCGGGCGGATCACTGAGACTGTCCTGCGCCGCGAGCGGCTTC |
| | | ACGTTCTCCTCCTACTCCATGAACTGGGTCCGCCAAGCCCCCGGGAAG |
| | | GGACTGGAATGGGTGTCCTCTATCTCCTCGTCGTCGTCCTACATCTAC |
| | | TACGCCGACTCCGTGAAGGGAAGATTCACCATTTCCCGCGACAACGCA |
| | | AAGAACTCACTGTACTTGCAAATGAACTCACTCCGGGCCGAAGATACT |
| | | GCTGTGTACTATTGCGCCAAGACTATTGCCGCCGTCTACGCTTTCGAC |
| | | ATCTGGGGCCAGGGAACCACCGTGACTGTGTCGTCCGGTGGTGGTGGC |
| | | TCGGGCGGAGGAGGAAGCGGCGGCGGGGGGTCCGAGATTGTGCTGACC |
| | | CAGTCGCCACTGAGCCTCCCTGTGACCCCCGAGGAACCCGCCAGCATC |
| | | AGCTGCCGGTCCAGCCAGTCCCTGCTCCACTCCAACGGATACAATTAC |
| | | CTCGATTGGTACCTTCAGAAGCCTGGACAAAGCCCGCAGCTGCTCATC |
| | | TACTTGGGATCAAACCGCGCGTCAGGAGTGCCTGACCGGTTCTCCGGC |
| | | TCGGGCAGCGGTACCGATTTCACCCTGAAAATCTCCAGGGTGGAGGCA |
| | | GAGGACGTGGGAGTGTATTACTGTATGCAGGCGCTGCAGACTCCGTAC |
| | | ACATTTGGGCAGGGCACCAAGCTGGAGATCAAGACCACTACCCCAGCA |
| | | CCGAGGCCACCCACCCCGGCTCCTACCATCGCCTCCCAGCCTCTGTCC |
| | | CTGCGTCCGGAGGCATGTAGACCCGCAGCTGGTGGGGCCGTGCATACC |
| | | CGGGGTCTTGACTTCGCCTGCGATATCTACATTTGGGCCCCTCTGGCT |
| | | GGTACTTGCGGGGTCCTGCTGCTTTCACTCGTGATCACTCTTTACTGT |
| | | AAGCGCGGTCGGAAGAAGCTGCTGTACATCTTTAAGCAACCCTTCATG |
| | | AGGCCTGTGCAGACTACTCAAGAGGAGGACGGCTGTTCATGCCGGTTC |
| | | CCAGAGGAGGAGGAAGGCGGCTGCGAACTGCGCGTGAAATTCAGCCGC |
| | | AGCGCAGATGCTCCAGCCTACAAGCAGGGGCAGAACCAGCTCTACAAC |
| | | GAACTCAATCTTGGTCGGAGAGAGGAGTACGACGTGCTGGACAAGCGG |
| | | AGAGGACGGGACCCAGAAATGGGCGGGAAGCCGCGCAGAAAGAATCCC |
| | | CAAGAGGGCCTGTACAACGAGCTCCAAAAGGATAAGATGGCAGAAGCC |
| | | TATAGCGAGATTGGTATGAAAGGGGAACGCAGAAGAGGCAAAGGCCAC |
| | | GACGGACTGTACCAGGGACTCAGCACCGCCACCAAGGACACCTATGAC |
| | | GCTCTTCACATGCAGGCCCTGCCGCCTCGG |

149365

| | | |
|---|---|---|
| 149365-aa | 402 | EVQLVESGGGLVKPGGSLRLSCAASGFTFSDYYMSWIRQAPGKGLEWV |
| ScFv | | SYISSSGSTIYYADSVKGRFTISRDNAKNSLYLQMNSLRAEDTAVYYC |
| domain | | ARDLRGAFDIWGQGTMVTVSSGGGGSGGGGSGGGGSSYVLTQSPSVSA |
| | | APGYTATISCGGNNIGTKSVHWYQQKPGQAPLLVIRDDSVRPSKIPGR |
| | | FSGSNSGNMATLTISGVQAGDEADFYCQVWDSDSEHVVFGGGTKLTVL |
| 149365-nt | 403 | GAAGTCCAGCTCGTGGAGTCCGGCGGAGGCCTTGTGAAGCCTGGAGGT |
| ScFv | | TCGCTGAGACTGTCCTGCGCCGCCTCCGGCTTCACCTTCTCCGACTAC |
| domain | | TACATGTCCTGGATCAGACAGGCCCCGGGAAAGGGCCTGGAATGGGTG |
| | | TCCTACATCTCGTCATCGGGCAGCACTATCTACTACGCGGACTCAGTG |
| | | AAGGGGCGGTTCACCATTTCCCGGGATAACGCGAAGAACTCGCTGTAT |
| | | CTGCAAATGAACTCACTGAGGGCCGAGGACACCGCCGTGTACTACTGC |
| | | GCCCGCGATCTCCGCGGGGCATTTGACATCTGGGGACAGGGAACCATG |
| | | GTCACAGTGTCCAGCGGAGGGGGAGGATCGGGTGGCGGAGGTTCCGGG |
| | | GGTGGAGGCTCCTCCTACGTGCTGACTCAGAGCCCAAGCGTCAGCGCT |
| | | GCGCCCGGTTACACGGCAACCATCTCCTGTGGCGGAAACAACATTGGG |
| | | ACCAAGTCTGTGCACTGGTATCAGCAGAAGCCGGGCCAAGCTCCCCTG |
| | | TTGGTGATCCGCGATGACTCCGTGCGGCCTAGCAAAATTCCGGGACGG |
| | | TTCTCCGGCTCCAACAGCGGCAATATGGCCACTCTCACCATCTCGGGA |
| | | GTGCAGGCCGGAGATGAAGCCGACTTCTACTGCCAAGTCTGGGACTCA |
| | | GACTCCGAGCATGTGGTGTTCGGGGGCGGAACCAAGCTGACTGTGCTC |
| 149365-aa | 404 | EVQLVESGGGLVKPGGSLRLSCAASGFTFSDYYMSWIRQAPGKGLEWV |
| VH | | SYISSSGSTIYYADSVKGRFTISRDNAKNSLYLQMNSLRAEDTAVYYC |
| | | ARDLRGAFDIWGQGTMVTVSS |
| 149365-aa | 405 | SYVLTQSPSVSAAPGYTATISCGGNNIGTKSVHWYQQKPGQAPLLVIR |
| VL | | DDSVRPSKIPGRFSGSNSGNMATLTISGVQAGDEADFYCQVWDSDSEH |
| | | VVFGGGTKLTVL |
| 149365-aa | 406 | MALPVTALLLPLALLLHAARPEVQLVESGGGLVKPGGSLRLSCAASGF |
| Full CAR | | TFSDYYMSWIRQAPGKGLEWVSYISSSGSTIYYADSVKGRFTISRDNA |
| | | KNSLYLQMNSLRAEDTAVYYCARDLRGAFDIWGQGTMVTVSSGGGGSG |
| | | GGGSGGGGSSYVLTQSPSVSAAPGYTATISCGGNNIGTKSVHWYQQKP |
| | | GQAPLLVIRDDSVRPSKIPGRFSGSNSGNMATLTISGVQAGDEADFYC |
| | | QVWDSDSEHVVFGGGTKLTVLTTTPAPRPPTPAPTIASQPLSLRPEAC |
| | | RPAAGGAVHTRGLDFACDIYIWAPLAGTCGVLLLSLVITLYCKRGRKK |
| | | LLYIFKQPFMRPVQTTQEEDGCSCRFPEEEEGGCELRVKFSRSADAPA |
| | | YKQGQNQLYNELNLGRREEYDVLDKRRGRDPEMGGKPRRKNPQEGLYN |
| | | ELQKDKMAEAYSEIGMKGERRRGKGHDGLYQGLSTATKDTYDALHMQA |
| | | LPPR |
| 149365-nt | 407 | ATGGCCCTCCCTGTCACCGCCCTGCTGCTTCCGCTGGCTCTTCTGCTC |
| Full CAR | | CACGCCGCTCGGCCCGAAGTCCAGCTCGTGGAGTCCGGCGGAGGCCTT |
| | | GTGAAGCCTGGAGGTTCGCTGAGACTGTCCTGCGCCGCCTCCGGCTTC |
| | | ACCTTCTCCGACTACTACATGTCCTGGATCAGACAGGCCCCGGGAAAG |
| | | GGCCTGGAATGGGTGTCCTACATCTCGTCATCGGGCAGCACTATCTAC |
| | | TACGCGGACTCAGTGAAGGGGCGGTTCACCATTTCCCGGGATAACGCG |
| | | AAGAACTCGCTGTATCTGCAAATGAACTCACTGAGGGCCGAGGACACC |
| | | GCCGTGTACTACTGCGCCCGCGATCTCCGCGGGGCATTTGACATCTGG |
| | | GGACAGGGAACCATGGTCACAGTGTCCAGCGGAGGGGGAGGATCGGGT |
| | | GGCGGAGGTTCCGGGGGTGGAGGCTCCTCCTACGTGCTGACTCAGAGC |
| | | CCAAGCGTCAGCGCTGCGCCCGGTTACACGGCAACCATCTCCTGTGGC |
| | | GGAAACAACATTGGGACCAAGTCTGTGCACTGGTATCAGCAGAAGCCG |
| | | GGCCAAGCTCCCCTGTTGGTGATCCGCGATGACTCCGTGCGGCCTAGC |
| | | AAAATTCCGGGACGGTTCTCCGGCTCCAACAGCGGCAATATGGCCACT |
| | | CTCACCATCTCGGGAGTGCAGGCCGGAGATGAAGCCGACTTCTACTGC |
| | | CAAGTCTGGGACTCAGACTCCGAGCATGTGGTGTTCGGGGGCGGAACC |
| | | AAGCTGACTGTGCTCACCACTACCCCAGCACCGAGGCCACCCACCCCG |
| | | GCTCCTACCATCGCCTCCCAGCCTCTGTCCCTGCGTCCGGAGGCATGT |
| | | AGACCCGCAGCTGGTGGGGCCGTGCATACCCGGGGTCTTGACTTCGCC |
| | | TGCGATATCTACATTTGGGCCCCTCTGGCTGGTACTTGCGGGGTCCTG |
| | | CTGCTTTCACTCGTGATCACTCTTTACTGTAAGCGCGGTCGGAAGAAG |
| | | CTGCTGTACATCTTTAAGCAACCCTTCATGAGGCCTGTGCAGACTACT |
| | | CAAGAGGAGGACGGCTGTTCATGCCGGTTCCCAGAGGAGGAGGAAGGC |
| | | GGCTGCGAACTGCGCGTGAAATTCAGCCGCAGCGCAGATGCTCCAGCC |
| | | TACAAGCAGGGGCAGAACCAGCTCTACAACGAACTCAATCTTGGTCGG |
| | | AGAGAGGAGTACGACGTGCTGGACAAGCGGAGAGGACGGGACCCAGAA |
| | | ATGGGCGGGAAGCCGCGCAGAAAGAATCCCCAAGAGGGCCTGTACAAC |
| | | GAGCTCCAAAAGGATAAGATGGCAGAAGCCTATAGCGAGATTGGTATG |
| | | AAAGGGGAACGCAGAAGAGGCAAAGGCCACGACGGACTGTACCAGGGA |
| | | CTCAGCACCGCCACCAAGGACACCTATGACGCTCTTCACATGCAGGCC |
| | | CTGCCGCCTCGG |

149366

| | | |
|---|---|---|
| 149366-aa | 408 | QVQLVQSGAEVKKPGASVKVSCKPSGYTVTSHYIHWVRRAPGQGLEWM |
| ScFv | | GMINPSGGVTAYSQTLQGRVTMTSDTSSSTVYMELSSLRSEDTAMYYC |
| domain | | AREGSGSGWYFDFWGRGTLVTVSSGGGGSGGGGSGGGGSSYVLTQPPS |
| | | VSVSPGQTASITCSGDGLSKKYVSWYQQKAGQSPVVLISRDKERPSGI |
| | | PDRFSGSNSADTATLTISGTQAMDEADYYCQAWDDTTVVFGGGTKLTV |
| | | L |
| 149366-nt | 409 | CAAGTGCAGCTGGTGCAGAGCGGGGCCGAAGTCAAGAAGCCGGGAGCC |
| ScFv | | TCCGTGAAAGTGTCCTGCAAGCCTTCGGGATACACCGTGACCTCCCAC |
| domain | | TACATTCATTGGGTCCGCCGCGCCCCCGGCCAAGGACTCGAGTGGATG |
| | | GGCATGATCAACCCTAGCGGCGGAGTGACCGCGTACAGCCAGACGCTG |
| | | CAGGGACGCGTGACTATGACCTCGGATACCTCCTCCTCCACCGTCTAT |
| | | ATGGAACTGTCCAGCCTGCGGTCCGAGGATACCGCCATGTACTACTGC |
| | | GCCCGGGAAGGATCAGGCTCCGGGTGGTATTTCGACTTCTGGGGAAGA |
| | | GGCACCCTCGTGACTGTGTCATCTGGGGGAGGGGGTTCCGGTGGTGGC |
| | | GGATCGGGAGGAGGCGGTTCATCCTACGTGCTGACCCAGCCACCCTCC |
| | | GTGTCCGTGAGCCCCGGCCAGACTGCATCGATTACATGTAGCGGCGAC |
| | | GGCCTCTCCAAGAAATACGTGTCGTGGTACCAGCAGAAGGCCGGACAG |
| | | AGCCCGGTGGTGCTGATCTCAAGAGATAAGGAGCGGCCTAGCGGAATC |
| | | CCGGACAGGTTCTCGGGTTCCAACTCCGCGGACACTGCTACTCTGACC |
| | | ATCTCGGGGACCCAGGCTATGGACGAAGCCGATTACTACTGCCAAGCC |
| | | TGGGACGACACTACTGTCGTGTTTGGAGGGGGCACCAAGTTGACCGTC |
| | | CTT |
| 149366-aa | 410 | QVQLVQSGAEVKKPGASVKVSCKPSGYTVTSHYIHWVRRAPGQGLEWM |
| VH | | GMINPSGGVTAYSQTLQGRVTMTSDTSSSTVYMELSSLRSEDTAMYYC |
| | | AREGSGSGWYFDFWGRGTLVTVSS |
| 149366-aa | 411 | SYVLTQPPSVSVSPGQTASITCSGDGLSKKYVSWYQQKAGQSPVVLIS |
| VL | | RDKERPSGIPDRFSGSNSADTATLTISGTQAMDEADYYCQAWDDTTVV |
| | | FGGGTKLTVL |
| 149366-aa | 412 | MALPVTALLLPLALLLHAARPQVQLVQSGAEVKKPGASVKVSCKPSGY |
| Full CAR | | TVTSHYIHWVRRAPGQGLEWMGMINPSGGVTAYSQTLQGRVTMTSDTS |
| | | SSTVYMELSSLRSEDTAMYYCAREGSGSGWYFDFWGRGTLVTVSSGGG |
| | | GSGGGGSGGGGSSYVLTQPPSVSVSPGQTASITCSGDGLSKKYVSWYQ |
| | | QKAGQSPVVLISRDKERPSGIPDRFSGSNSADTATLTISGTQAMDEAD |
| | | YYCQAWDDTTVVFGGGTKLTVLTTTPAPRPPTPAPTIASQPLSLRPEA |
| | | CRPAAGGAVHTRGLDFACDIYIWAPLAGTCGVLLLSLVITLYCKRGRK |
| | | KLLYIFKQPFMRPVQTTQEEDGCSCRFPEEEEGGCELRVKFSRSADAP |
| | | AYKQGQNQLYNELNLGRREEYDVLDKRRGRDPEMGGKPRRKNPQEGLY |
| | | NELQKDKMAEAYSEIGMKGERRRGKGHDGLYQGLSTATKDTYDALHMQ |
| | | ALPPR |
| 149366-nt | 413 | ATGGCCCTCCCTGTCACCGCCCTGCTGCTTCCGCTGGCTCTTCTGCTC |
| Full CAR | | CACGCCGCTCGGCCCCAAGTGCAGCTGGTGCAGAGCGGGGCCGAAGTC |
| | | AAGAAGCCGGGAGCCTCCGTGAAAGTGTCCTGCAAGCCTTCGGGATAC |
| | | ACCGTGACCTCCCACTACATTCATTGGGTCCGCCGCGCCCCCGGCCAA |
| | | GGACTCGAGTGGATGGGCATGATCAACCCTAGCGGCGGAGTGACCGCG |
| | | TACAGCCAGACGCTGCAGGGACGCGTGACTATGACCTCGGATACCTCC |
| | | TCCTCCACCGTCTATATGGAACTGTCCAGCCTGCGGTCCGAGGATACC |
| | | GCCATGTACTACTGCGCCCGGGAAGGATCAGGCTCCGGGTGGTATTTC |
| | | GACTTCTGGGGAAGAGGCACCCTCGTGACTGTGTCATCTGGGGGAGGG |
| | | GGTTCCGGTGGTGGCGGATCGGGAGGAGGCGGTTCATCCTACGTGCTG |
| | | ACCCAGCCACCCTCCGTGTCCGTGAGCCCCGGCCAGACTGCATCGATT |
| | | ACATGTAGCGGCGACGGCCTCTCCAAGAAATACGTGTCGTGGTACCAG |
| | | CAGAAGGCCGGACAGAGCCCGGTGGTGCTGATCTCAAGAGATAAGGAG |
| | | CGGCCTAGCGGAATCCCGGACAGGTTCTCGGGTTCCAACTCCGCGGAC |
| | | ACTGCTACTCTGACCATCTCGGGGACCCAGGCTATGGACGAAGCCGAT |
| | | TACTACTGCCAAGCCTGGGACGACACTACTGTCGTGTTTGGAGGGGGC |
| | | ACCAAGTTGACCGTCCTTACCACTACCCCAGCACCGAGGCCACCCACC |
| | | CCGGCTCCTACCATCGCCTCCCAGCCTCTGTCCCTGCGTCCGGAGGCA |
| | | TGTAGACCCGCAGCTGGTGGGGCCGTGCATACCCGGGGTCTTGACTTC |
| | | GCCTGCGATATCTACATTTGGGCCCCTCTGGCTGGTACTTGCGGGGTC |
| | | CTGCTGCTTTCACTCGTGATCACTCTTTACTGTAAGCGCGGTCGGAAG |
| | | AAGCTGCTGTACATCTTTAAGCAACCCTTCATGAGGCCTGTGCAGACT |
| | | ACTCAAGAGGAGGACGGCTGTTCATGCCGGTTCCCAGAGGAGGAGGAA |
| | | GGCGGCTGCGAACTGCGCGTGAAATTCAGCCGCAGCGCAGATGCTCCA |
| | | GCCTACAAGCAGGGGCAGAACCAGCTCTACAACGAACTCAATCTTGGT |
| | | CGGAGAGAGGAGTACGACGTGCTGGACAAGCGGAGAGGACGGGACCCA |
| | | GAAATGGGCGGGAAGCCGCGCAGAAAGAATCCCCAAGAGGGCCTGTAC |
| | | AACGAGCTCCAAAAGGATAAGATGGCAGAAGCCTATAGCGAGATTGGT |
| | | ATGAAAGGGGAACGCAGAAGAGGCAAAGGCCACGACGGACTGTACCAG |
| | | GGACTCAGCACCGCCACCAAGGACACCTATGACGCTCTTCACATGCAG |
| | | GCCCTGCCGCCTCGG |

149367

| | | |
|---|---|---|
| 149367-aa | 414 | QVQLQESGPGLVKPSQTLSLTCTVSGGSISSGGYYWSWIRQHPGKGLE |
| ScFv | | WIGYIYYSGSTYYNPSLKSRVTISVDTSKNQFSLKLSSVTAADTAVYY |
| domain | | CARAGIAARLRGAFDIWGQGTMVTVSSGGGGSGGGGSGGGGSDIVMTQ |
| | | SPSSVSASVGDRVIITCRASQGIRNWLAWYQQKPGKAPNLLIYAASNL |
| | | QSGVPSRFSGSGSGADFTLTISSLQPEDVATYYCQKYNSAPFTFGPGT |
| | | KVDIK |
| 149367-nt | 415 | CAAGTGCAGCTTCAGGAGAGCGGCCCGGGACTCGTGAAGCCGTCCCAG |
| ScFv | | ACCCTGTCCCTGACTTGCACCGTGTCGGGAGGAAGCATCTCGAGCGGA |
| domain | | GGCTACTATTGGTCGTGGATTCGGCAGCACCCTGGAAAGGGCCTGGAA |
| | | TGGATCGGCTACATCTACTACTCCGGCTCGACCTACTACAACCCATCG |
| | | CTGAAGTCCAGAGTGACAATCTCAGTGGACACGTCCAAGAATCAGTTC |
| | | AGCCTGAAGCTCTCTTCCGTGACTGCGGCCGACACCGCCGTGTACTAC |
| | | TGCGCACGCGCTGGAATTGCCGCCCGGCTGAGGGGTGCCTTCGACATT |
| | | TGGGGACAGGGCACCATGGTCACCGTGTCCTCCGGCGGCGGAGGTTCC |
| | | GGGGGTGGAGGCTCAGGAGGAGGGGGGTCCGACATCGTCATGACTCAG |
| | | TCGCCCTCAAGCGTCAGCGCGTCCGTCGGGGACAGAGTGATCATCACC |
| | | TGTCGGGCGTCCCAGGGAATTCGCAACTGGCTGGCCTGGTATCAGCAG |
| | | AAGCCCGGAAAGGCCCCCAACCTGTTGATCTACGCCGCCTCAAACCTC |
| | | CAATCCGGGGTGCCGAGCCGCTTCAGCGGCTCCGGTTCGGGTGCCGAT |
| | | TTCACTCTGACCATCTCCTCCCTGCAACCTGAAGATGTGGCTACCTAC |
| | | TACTGCCAAAAGTACAACTCCGCACCTTTTACTTTCGGACCGGGGACC |
| | | AAAGTGGACATTAAG |
| 149367-aa | 416 | QVQLQESGPGLVKPSQTLSLTCTVSGGSISSGGYYWSWIRQHPGKGLE |
| VH | | WIGYIYYSGSTYYNPSLKSRVTISVDTSKNQFSLKLSSVTAADTAVYY |
| | | CARAGIAARLRGAFDIWGQGTMVTVSS |
| 149367-aa | 417 | DIVMTQSPSSVSASVGDRVIITCRASQGIRNWLAWYQQKPGKAPNLLI |
| VL | | YAASNLQSGVPSRFSGSGSGADFTLTISSLQPEDVATYYCQKYNSAPF |
| | | TFGPGTKVDIK |
| 149367-aa | 418 | MALPVTALLLPLALLLHAARPQVQLQESGPGLVKPSQTLSLTCTVSGG |
| Full CAR | | SISSGGYYWSWIRQHPGKGLEWIGYIYYSGSTYYNPSLKSRVTISVDT |
| | | SKNQFSLKLSSVTAADTAVYYCARAGIAARLRGAFDIWGQGTMVTVSS |
| | | GGGGSGGGGSGGGGSDIVMTQSPSSVSASVGDRVIITCRASQGIRNWL |
| | | AWYQQKPGKAPNLLIYAASNLQSGVPSRFSGSGSGADFTLTISSLQPE |
| | | DVATYYCQKYNSAPFTFGPGTKVDIKTTTPAPRPPTPAPTIASQPLSL |
| | | RPEACRPAAGGAVHTRGLDFACDIYIWAPLAGTCGVLLLSLVITLYCK |
| | | RGRKKLLYIFKQPFMRPVQTTQEEDGCSCRFPEEEEGGCELRVKFSRS |
| | | ADAPAYKQGQNQLYNELNLGRREEYDVLDKRRGRDPEMGGKPRRKNPQ |
| | | EGLYNELQKDKMAEAYSEIGMKGERRRGKGHDGLYQGLSTATKDTYDA |
| | | LHMQALPPR |
| 149367-nt | 419 | ATGGCCCTCCCTGTCACCGCCCTGCTGCTTCCGCTGGCTCTTCTGCTC |
| Full CAR | | CACGCCGCTCGGCCCCAAGTGCAGCTTCAGGAGAGCGGCCCGGGACTC |
| | | GTGAAGCCGTCCCAGACCCTGTCCCTGACTTGCACCGTGTCGGGAGGA |
| | | AGCATCTCGAGCGGAGGCTACTATTGGTCGTGGATTCGGCAGCACCCT |
| | | GGAAAGGGCCTGGAATGGATCGGCTACATCTACTACTCCGGCTCGACC |
| | | TACTACAACCCATCGCTGAAGTCCAGAGTGACAATCTCAGTGGACACG |
| | | TCCAAGAATCAGTTCAGCCTGAAGCTCTCTTCCGTGACTGCGGCCGAC |
| | | ACCGCCGTGTACTACTGCGCACGCGCTGGAATTGCCGCCCGGCTGAGG |
| | | GGTGCCTTCGACATTTGGGGACAGGGCACCATGGTCACCGTGTCCTCC |
| | | GGCGGCGGAGGTTCCGGGGGTGGAGGCTCAGGAGGAGGGGGGTCCGAC |
| | | ATCGTCATGACTCAGTCGCCCTCAAGCGTCAGCGCGTCCGTCGGGGAC |
| | | AGAGTGATCATCACCTGTCGGGCGTCCCAGGGAATTCGCAACTGGCTG |
| | | GCCTGGTATCAGCAGAAGCCCGGAAAGGCCCCCAACCTGTTGATCTAC |
| | | GCCGCCTCAAACCTCCAATCCGGGGTGCCGAGCCGCTTCAGCGGCTCC |
| | | GGTTCGGGTGCCGATTTCACTCTGACCATCTCCTCCCTGCAACCTGAA |
| | | GATGTGGCTACCTACTACTGCCAAAAGTACAACTCCGCACCTTTTACT |
| | | TTCGGACCGGGGACCAAAGTGGACATTAAGACCACTACCCCAGCACCG |
| | | AGGCCACCCACCCCGGCTCCTACCATCGCCTCCCAGCCTCTGTCCCTG |
| | | CGTCCGGAGGCATGTAGACCCGCAGCTGGTGGGGCCGTGCATACCCGG |
| | | GGTCTTGACTTCGCCTGCGATATCTACATTTGGGCCCCTCTGGCTGGT |
| | | ACTTGCGGGGTCCTGCTGCTTTCACTCGTGATCACTCTTTACTGTAAG |
| | | CGCGGTCGGAAGAAGCTGCTGTACATCTTTAAGCAACCCTTCATGAGG |
| | | CCTGTGCAGACTACTCAAGAGGAGGACGGCTGTTCATGCCGGTTCCCA |
| | | GAGGAGGAGGAAGGCGGCTGCGAACTGCGCGTGAAATTCAGCCGCAGC |
| | | GCAGATGCTCCAGCCTACAAGCAGGGGCAGAACCAGCTCTACAACGAA |
| | | CTCAATCTTGGTCGGAGAGAGGAGTACGACGTGCTGGACAAGCGGAGA |
| | | GGACGGGACCCAGAAATGGGCGGGAAGCCGCGCAGAAAGAATCCCCAA |
| | | GAGGGCCTGTACAACGAGCTCCAAAAGGATAAGATGGCAGAAGCCTAT |
| | | AGCGAGATTGGTATGAAAGGGGAACGCAGAAGAGGCAAAGGCCACGAC |
| | | GGACTGTACCAGGGACTCAGCACCGCCACCAAGGACACCTATGACGCT |
| | | CTTCACATGCAGGCCCTGCCGCCTCGG |

149368

| | | |
|---|---|---|
| 149368-aa | 420 | QVQLVQSGAEVKKPGSSVKVSCKASGGTFSSYAISWVRQAPGQGLEWM |
| ScFv | | GGIIPIFGTANYAQKFQGRVTITADESTSTAYMELSSLRSEDTAVYYC |
| domain | | ARRGGYQLLRWDVGLLRSAFDIWGQGTMVTVSSGGGGSGGGGSGGGGS |
| | | SYVLTQPPSVSVAPGQTARITCGGNNIGSKSVHWYQQKPGQAPVLVLY |
| | | GKNNRPSGVPDRFSGSRSGTTASLTITGAQAEDEADYYCSSRDSSGDH |
| | | LRVFGTGTKVTVL |
| 149368-nt | 421 | CAAGTGCAGCTGGTCCAGTCGGGCGCCGAGGTCAAGAAGCCCGGGAGC |
| ScFv | | TCTGTGAAAGTGTCCTGCAAGGCCTCCGGGGGCACCTTTAGCTCCTAC |
| domain | | GCCATCTCCTGGGTCCGCCAAGCACCGGGTCAAGGCCTGGAGTGGATG |
| | | GGGGGAATTATCCCTATCTTCGGCACTGCCAACTACGCCCAGAAGTTC |
| | | CAGGGACGCGTGACCATTACCGCGGACGAATCCACCTCCACCGCTTAT |
| | | ATGGAGCTGTCCAGCTTGCGCTCGGAAGATACCGCCGTGTACTACTGC |
| | | GCCCGGAGGGGTGGATACCAGCTGCTGAGATGGGACGTGGGCCTCCTG |
| | | CGGTCGGCGTTCGACATCTGGGGCCAGGGCACTATGGTCACTGTGTCC |
| | | AGCGGAGGAGGCGGATCGGGAGGCGGCGGATCAGGGGGAGGCGGTTCC |
| | | AGCTACGTGCTTACTCAACCCCCTTCGGTGTCCGTGGCCCCGGGACAG |
| | | ACCGCCAGAATCACTTGCGGAGGAAACAACATTGGGTCCAAGAGCGTG |
| | | CATTGGTACCAGCAGAAGCCAGGACAGGCCCCTGTGCTGGTGCTCTAC |
| | | GGGAAGAACAATCGGCCCAGCGGAGTGCCGGACAGGTTCTCGGGTTCA |
| | | CGCTCCGGTACAACCGCTTCACTGACTATCACCGGGGCCCAGGCAGAG |
| | | GATGAAGCGGACTACTACTGTTCCTCCCGGGATTCATCCGGCGACCAC |
| | | CTCCGGGTGTTCGGAACCGGAACGAAGGTCACCGTGCTG |
| 149368-aa | 422 | QVQLVQSGAEVKKPGSSVKVSCKASGGTFSSYAISWVRQAPGQGLEWM |
| VH | | GGIIPIFGTANYAQKFQGRVTITADESTSTAYMELSSLRSEDTAVYYC |
| | | ARRGGYQLLRWDVGLLRSAFDIWGQGTMVTVSS |
| 149368-aa | 423 | SYVLTQPPSVSVAPGQTARITCGGNNIGSKSVHWYQQKPGQAPVLVLY |
| VL | | GKNNRPSGVPDRFSGSRSGTTASLTITGAQAEDEADYYCSSRDSSGDH |
| | | LRVFGTGTKVTVL |
| 149368-aa | 424 | MALPVTALLLPLALLLHAARPQVQLVQSGAEVKKPGSSVKVSCKASGG |
| Full CAR | | TESSYAISWVRQAPGQGLEWMGGIIPIFGTANYAQKFQGRVTITADES |
| | | TSTAYMELSSLRSEDTAVYYCARRGGYQLLRWDVGLLRSAFDIWGQGT |
| | | MVTVSSGGGGSGGGGSGGGGSSYVLTQPPSVSVAPGQTARITCGGNNI |
| | | GSKSVHWYQQKPGQAPVLVLYGKNNRPSGVPDRFSGSRSGTTASLTIT |
| | | GAQAEDEADYYCSSRDSSGDHLRVFGTGTKVTVLTTTPAPRPPTPAPT |
| | | IASQPLSLRPEACRPAAGGAVHTRGLDFACDIYIWAPLAGTCGVLLLS |
| | | LVITLYCKRGRKKLLYIFKQPFMRPVQTTQEEDGCSCRFPEEEEGGCE |
| | | LRVKFSRSADAPAYKQGQNQLYNELNLGRREEYDVLDKRRGRDPEMGG |
| | | KPRRKNPQEGLYNELQKDKMAEAYSEIGMKGERRRGKGHDGLYQGLST |
| | | ATKDTYDALHMQALPPR |
| 149368-nt | 425 | ATGGCCCTCCCTGTCACCGCCCTGCTGCTTCCGCTGGCTCTTCTGCTC |
| Full CAR | | CACGCCGCTCGGCCCCAAGTGCAGCTGGTCCAGTCGGGCGCCGAGGTC |
| | | AAGAAGCCCGGGAGCTCTGTGAAAGTGTCCTGCAAGGCCTCCGGGGGC |
| | | ACCTTTAGCTCCTACGCCATCTCCTGGGTCCGCCAAGCACCGGGTCAA |
| | | GGCCTGGAGTGGATGGGGGGAATTATCCCTATCTTCGGCACTGCCAAC |
| | | TACGCCCAGAAGTTCCAGGGACGCGTGACCATTACCGCGGACGAATCC |
| | | ACCTCCACCGCTTATATGGAGCTGTCCAGCTTGCGCTCGGAAGATACC |
| | | GCCGTGTACTACTGCGCCCGGAGGGGTGGATACCAGCTGCTGAGATGG |
| | | GACGTGGGCCTCCTGCGGTCGGCGTTCGACATCTGGGGCCAGGGCACT |
| | | ATGGTCACTGTGTCCAGCGGAGGAGGCGGATCGGGAGGCGGCGGATCA |
| | | GGGGGAGGCGGTTCCAGCTACGTGCTTACTCAACCCCCTTCGGTGTCC |
| | | GTGGCCCCGGGACAGACCGCCAGAATCACTTGCGGAGGAAACAACATT |
| | | GGGTCCAAGAGCGTGCATTGGTACCAGCAGAAGCCAGGACAGGCCCCT |
| | | GTGCTGGTGCTCTACGGGAAGAACAATCGGCCCAGCGGAGTGCCGGAC |
| | | AGGTTCTCGGGTTCACGCTCCGGTACAACCGCTTCACTGACTATCACC |
| | | GGGGCCCAGGCAGAGGATGAAGCGGACTACTACTGTTCCTCCCGGGAT |
| | | TCATCCGGCGACCACCTCCGGGTGTTCGGAACCGGAACGAAGGTCACC |
| | | GTGCTGACCACTACCCCAGCACCGAGGCCACCCACCCCGGCTCCTACC |
| | | ATCGCCTCCCAGCCTCTGTCCCTGCGTCCGGAGGCATGTAGACCCGCA |
| | | GCTGGTGGGGCCGTGCATACCCGGGGTCTTGACTTCGCCTGCGATATC |
| | | TACATTTGGGCCCCTCTGGCTGGTACTTGCGGGGTCCTGCTGCTTTCA |
| | | CTCGTGATCACTCTTTACTGTAAGCGCGGTCGGAAGAAGCTGCTGTAC |
| | | ATCTTTAAGCAACCCTTCATGAGGCCTGTGCAGACTACTCAAGAGGAG |
| | | GACGGCTGTTCATGCCGGTTCCCAGAGGAGGAGGAAGGCGGCTGCGAA |
| | | CTGCGCGTGAAATTCAGCCGCAGCGCAGATGCTCCAGCCTACAAGCAG |
| | | GGGCAGAACCAGCTCTACAACGAACTCAATCTTGGTCGGAGAGAGGAG |
| | | TACGACGTGCTGGACAAGCGGAGAGGACGGGACCCAGAAATGGGCGGG |
| | | AAGCCGCGCAGAAAGAATCCCCAAGAGGGCCTGTACAACGAGCTCCAA |
| | | AAGGATAAGATGGCAGAAGCCTATAGCGAGATTGGTATGAAAGGGGAA |
| | | CGCAGAAGAGGCAAAGGCCACGACGGACTGTACCAGGGACTCAGCACC |
| | | GCCACCAAGGACACCTATGACGCTCTTCACATGCAGGCCCTGCCGCCT |
| | | CGG |

149369

| | | |
|---|---|---|
| 149369-aa | 426 | EVQLQQSGPGLVKPSQTLSLTCAISGDSVSSNSAAWNWIRQSPSRGLE |
| ScFv | | WLGRTYYRSKWYSFYAISLKSRIIINPDTSKNQFSLQLKSVTPEDTAV |
| domain | | YYCARSSPEGLFLYWFDPWGQGTLVTVSSGGDGSGGGGSGGGGSSSEL |
| | | TQDPAVSVALGQTIRITCQGDSLGNYYATWYQQKPGQAPVLVIYGTNN |
| | | RPSGIPDRFSASSSGNTASLTITGAQAEDEADYYCNSRDSSGHHLLFG |
| | | TGTKVTVL |
| 149369-nt | 427 | GAAGTGCAGCTCCAACAGTCAGGACCGGGGCTCGTGAAGCCATCCCAG |
| ScFv | | ACCCTGTCCCTGACTTGTGCCATCTCGGGAGATAGCGTGTCATCGAAC |
| domain | | TCCGCCGCCTGGAACTGGATTCGGCAGAGCCCGTCCCGCGGACTGGAG |
| | | TGGCTTGGAAGGACCTACTACCGGTCCAAGTGGTACTCTTTCTACGCG |
| | | ATCTCGCTGAAGTCCCGCATTATCATTAACCCTGATACCTCCAAGAAT |
| | | CAGTTCTCCCTCCAACTGAAATCCGTCACCCCCGAGGACACAGCAGTG |
| | | TATTACTGCGCACGGAGCAGCCCCGAAGGACTGTTCCTGTATTGGTTT |
| | | GACCCCTGGGGCCAGGGGACTCTTGTGACCGTGTCGAGCGGCGGAGAT |
| | | GGGTCCGGTGGCGGTGGTTCGGGGGGCGGCGGATCATCATCCGAACTG |
| | | ACCCAGGACCCGGCTGTGTCCGTGGCGCTGGGACAAACCATCCGCATT |
| | | ACGTGCCAGGGAGACTCCCTGGGCAACTACTACGCCACTTGGTACCAG |
| | | CAGAAGCCGGGCCAAGCCCCTGTGTTGGTCATCTACGGGACCAACAAC |
| | | AGACCTTCCGGCATCCCCGACCGGTTCAGCGCTTCGTCCTCCGGCAAC |
| | | ACTGCCAGCCTGACCATCACTGGAGCGCAGGCCGAAGATGAGGCCGAC |
| | | TACTACTGCAACAGCAGAGACTCCTCGGGTCATCACCTCTTGTTCGGA |
| | | ACTGGAACCAAGGTCACCGTGCTG |
| 149369-aa | 428 | EVQLQQSGPGLVKPSQTLSLTCAISGDSVSSNSAAWNWIRQSPSRGLE |
| VH | | WLGRTYYRSKWYSFYAISLKSRIIINPDTSKNQFSLQLKSVTPEDTAV |
| | | YYCARSSPEGLFLYWFDPWGQGTLVTVSS |
| 149369-aa | 429 | SSELTQDPAVSVALGQTIRITCQGDSLGNYYATWYQQKPGQAPVLVIY |
| VL | | GTNNRPSGIPDRFSASSSGNTASLTITGAQAEDEADYYCNSRDSSGHH |
| | | LLFGTGTKVTVL |
| 149369-aa | 430 | MALPVTALLLPLALLLHAARPEVQLQQSGPGLVKPSQTLSLTCAISGD |
| Full CAR | | SVSSNSAAWNWIRQSPSRGLEWLGRTYYRSKWYSFYAISLKSRIIINP |
| | | DTSKNQFSLQLKSVTPEDTAVYYCARSSPEGLFLYWFDPWGQGTLVTV |
| | | SSGGDGSGGGGSGGGGSSSELTQDPAVSVALGQTIRITCQGDSLGNYY |
| | | ATWYQQKPGQAPVLVIYGTNNRPSGIPDRFSASSSGNTASLTITGAQA |
| | | EDEADYYCNSRDSSGHHLLFGTGTKVTVLTTTPAPRPPTPAPTIASQP |
| | | LSLRPEACRPAAGGAVHTRGLDFACDIYIWAPLAGTCGVLLLSLVITL |
| | | YCKRGRKKLLYIFKQPFMRPVQTTQEEDGCSCRFPEEEEGGCELRVKF |
| | | SRSADAPAYKQGQNQLYNELNLGRREEYDVLDKRRGRDPEMGGKPRRK |
| | | NPQEGLYNELQKDKMAEAYSEIGMKGERRRGKGHDGLYQGLSTATKDT |
| | | YDALHMQALPPR |
| 149369-nt | 431 | ATGGCCCTCCCTGTCACCGCCCTGCTGCTTCCGCTGGCTCTTCTGCTC |
| Full CAR | | CACGCCGCTCGGCCCGAAGTGCAGCTCCAACAGTCAGGACCGGGGCTC |
| | | GTGAAGCCATCCCAGACCCTGTCCCTGACTTGTGCCATCTCGGGAGAT |
| | | AGCGTGTCATCGAACTCCGCCGCCTGGAACTGGATTCGGCAGAGCCCG |
| | | TCCCGCGGACTGGAGTGGCTTGGAAGGACCTACTACCGGTCCAAGTGG |
| | | TACTCTTTCTACGCGATCTCGCTGAAGTCCCGCATTATCATTAACCCT |
| | | GATACCTCCAAGAATCAGTTCTCCCTCCAACTGAAATCCGTCACCCCC |
| | | GAGGACACAGCAGTGTATTACTGCGCACGGAGCAGCCCCGAAGGACTG |
| | | TTCCTGTATTGGTTTGACCCCTGGGGCCAGGGGACTCTTGTGACCGTG |
| | | TCGAGCGGCGGAGATGGGTCCGGTGGCGGTGGTTCGGGGGGCGGCGGA |
| | | TCATCATCCGAACTGACCCAGGACCCGGCTGTGTCCGTGGCGCTGGGA |
| | | CAAACCATCCGCATTACGTGCCAGGGAGACTCCCTGGGCAACTACTAC |
| | | GCCACTTGGTACCAGCAGAAGCCGGGCCAAGCCCCTGTGTTGGTCATC |
| | | TACGGGACCAACAACAGACCTTCCGGCATCCCCGACCGGTTCAGCGCT |
| | | TCGTCCTCCGGCAACACTGCCAGCCTGACCATCACTGGAGCGCAGGCC |
| | | GAAGATGAGGCCGACTACTACTGCAACAGCAGAGACTCCTCGGGTCAT |
| | | CACCTCTTGTTCGGAACTGGAACCAAGGTCACCGTGCTGACCACTACC |
| | | CCAGCACCGAGGCCACCCACCCCGGCTCCTACCATCGCCTCCCAGCCT |
| | | CTGTCCCTGCGTCCGGAGGCATGTAGACCCGCAGCTGGTGGGGCCGTG |
| | | CATACCCGGGGTCTTGACTTCGCCTGCGATATCTACATTTGGGCCCCT |
| | | CTGGCTGGTACTTGCGGGGTCCTGCTGCTTTCACTCGTGATCACTCTT |
| | | TACTGTAAGCGCGGTCGGAAGAAGCTGCTGTACATCTTTAAGCAACCC |
| | | TTCATGAGGCCTGTGCAGACTACTCAAGAGGAGGACGGCTGTTCATGC |
| | | CGGTTCCCAGAGGAGGAGGAAGGCGGCTGCGAACTGCGCGTGAAATTC |
| | | AGCCGCAGCGCAGATGCTCCAGCCTACAAGCAGGGGCAGAACCAGCTC |
| | | TACAACGAACTCAATCTTGGTCGGAGAGAGGAGTACGACGTGCTGGAC |
| | | AAGCGGAGAGGACGGGACCCAGAAATGGGCGGGAAGCCGCGCAGAAAG |
| | | AATCCCCAAGAGGGCCTGTACAACGAGCTCCAAAAGGATAAGATGGCA |
| | | GAAGCCTATAGCGAGATTGGTATGAAAGGGGAACGCAGAAGAGGCAAA |
| | | GGCCACGACGGACTGTACCAGGGACTCAGCACCGCCACCAAGGACACC |
| | | TATGACGCTCTTCACATGCAGGCCCTGCCGCCTCGG |

BCMA_EBB-C1978-A4

| | | |
|---|---|---|
| BCMA_EBB- | 432 | EVQLVESGGGLVQPGGSLRLSCAASGFTFSSYAMSWVRQAPGKGLEWV |
| C1978-A4- | | SAISGSGGSTYYADSVKGRFTISRDNSKNTLYLQMNSLRAEDTAVYYC |
| aa | | AKVEGSGSLDYWGQGTLVTVSSGGGGSGGGGSGGGGSEIVMTQSPGTL |
| ScFv | | SLSPGERATLSCRASQSVSSAYLAWYQQKPGQPPRLLISGASTRATGI |
| domain | | PDRFGGSGSGTDFTLTISRLEPEDFAVYYCQHYGSSFNGSSLFTFGQG |
| | | TRLEIK |
| BCMA_EBB- | 433 | GAAGTGCAGCTCGTGGAGTCAGGAGGCGGCCTGGTCCAGCCGGGAGGG |
| C1978-A4- | | TCCCTTAGACTGTCATGCGCCGCAAGCGGATTCACTTTCTCCTCCTAT |
| nt | | GCCATGAGCTGGGTCCGCCAAGCCCCCGGAAAGGGACTGGAATGGGTG |
| ScFv | | TCCGCCATCTCGGGGTCTGGAGGCTCAACTTACTACGCTGACTCCGTG |
| domain | | AAGGGACGGTTCACCATTAGCCGCGACAACTCCAAGAACACCCTCTAC |
| | | CTCCAAATGAACTCCCTGCGGGCCGAGGATACCGCCGTCTACTACTGC |
| | | GCCAAAGTGGAAGGTTCAGGATCGCTGGACTACTGGGGACAGGGTACT |
| | | CTCGTGACCGTGTCATCGGGCGGAGGAGGTTCCGGCGGTGGCGGCTCC |
| | | GGCGGCGGAGGGTCGGAGATCGTGATGACCCAGAGCCCTGGTACTCTG |
| | | AGCCTTTCGCCGGGAGAAAGGGCCACCCTGTCCTGCCGCGCTTCCCAA |
| | | TCCGTGTCCTCCGCGTACTTGGCGTGGTACCAGCAGAAGCCGGGACAG |
| | | CCCCCTCGGCTGCTGATCAGCGGGGCCAGCACCCGGGCAACCGGAATC |
| | | CCAGACAGATTCGGGGGTTCCGGCAGCGGCACAGATTTCACCCTGACT |
| | | ATTTCGAGGTTGGAGCCCGAGGACTTTGCGGTGTATTACTGTCAGCAC |
| | | TACGGGTCGTCCTTTAATGGCTCCAGCCTGTTCACGTTCGGACAGGGG |
| | | ACCCGCCTGGAAATCAAG |
| BCMA_EBB- | 434 | EVQLVESGGGLVQPGGSLRLSCAASGFTFSSYAMSWVRQAPGKGLEWV |
| C1978-A4- | | SAISGSGGSTYYADSVKGRFTISRDNSKNTLYLQMNSLRAEDTAVYYC |
| aa | | AKVEGSGSLDYWGQGTLVTVSS |
| VH | | |
| BCMA_EBB- | 435 | EIVMTQSPGTLSLSPGERATLSCRASQSVSSAYLAWYQQKPGQPPRLL |
| C1978-A4- | | ISGASTRATGIPDRFGGSGSGTDFTLTISRLEPEDFAVYYCQHYGSSF |
| aa | | NGSSLFTFGQGTRLEIK |
| VL | | |
| BCMA_EBB- | 436 | MALPVTALLLPLALLLHAARPEVQLVESGGGLVQPGGSLRLSCAASGF |
| C1978-A4- | | TFSSYAMSWVRQAPGKGLEWVSAISGSGGSTYYADSVKGRFTISRDNS |
| aa | | KNTLYLQMNSLRAEDTAVYYCAKVEGSGSLDYWGQGTLVTVSSGGGGS |
| Full CART | | GGGGSGGGGSEIVMTQSPGTLSLSPGERATLSCRASQSVSSAYLAWYQ |
| | | QKPGQPPRLLISGASTRATGIPDRFGGSGSGTDFTLTISRLEPEDFAV |
| | | YYCQHYGSSFNGSSLFTFGQGTRLEIKTTTPAPRPPTPAPTIASQPLS |
| | | LRPEACRPAAGGAVHTRGLDFACDIYIWAPLAGTCGVLLLSLVITLYC |
| | | KRGRKKLLYIFKQPFMRPVQTTQEEDGCSCRFPEEEEGGCELRVKFSR |
| | | SADAPAYKQGQNQLYNELNLGRREEYDVLDKRRGRDPEMGGKPRRKNP |
| | | QEGLYNELQKDKMAEAYSEIGMKGERRRGKGHDGLYQGLSTATKDTYD |
| | | ALHMQALPPR |
| BCMA_EBB- | 437 | ATGGCCCTCCCTGTCACCGCCCTGCTGCTTCCGCTGGCTCTTCTGCTC |
| C1978-A4- | | CACGCCGCTCGGCCCGAAGTGCAGCTCGTGGAGTCAGGAGGCGGCCTG |
| nt | | GTCCAGCCGGGAGGGTCCCTTAGACTGTCATGCGCCGCAAGCGGATTC |
| Full CART | | ACTTTCTCCTCCTATGCCATGAGCTGGGTCCGCCAAGCCCCCGGAAAG |
| | | GGACTGGAATGGGTGTCCGCCATCTCGGGGTCTGGAGGCTCAACTTAC |
| | | TACGCTGACTCCGTGAAGGGACGGTTCACCATTAGCCGCGACAACTCC |
| | | AAGAACACCCTCTACCTCCAAATGAACTCCCTGCGGGCCGAGGATACC |
| | | GCCGTCTACTACTGCGCCAAAGTGGAAGGTTCAGGATCGCTGGACTAC |
| | | TGGGGACAGGGTACTCTCGTGACCGTGTCATCGGGCGGAGGAGGTTCC |
| | | GGCGGTGGCGGCTCCGGCGGCGGAGGGTCGGAGATCGTGATGACCCAG |
| | | AGCCCTGGTACTCTGAGCCTTTCGCCGGGAGAAAGGGCCACCCTGTCC |
| | | TGCCGCGCTTCCCAATCCGTGTCCTCCGCGTACTTGGCGTGGTACCAG |
| | | CAGAAGCCGGGACAGCCCCCTCGGCTGCTGATCAGCGGGGCCAGCACC |
| | | CGGGCAACCGGAATCCCAGACAGATTCGGGGGTTCCGGCAGCGGCACA |
| | | GATTTCACCCTGACTATTTCGAGGTTGGAGCCCGAGGACTTTGCGGTG |
| | | TATTACTGTCAGCACTACGGGTCGTCCTTTAATGGCTCCAGCCTGTTC |
| | | ACGTTCGGACAGGGGACCCGCCTGGAAATCAAGACCACTACCCCAGCA |
| | | CCGAGGCCACCCACCCCGGCTCCTACCATCGCCTCCCAGCCTCTGTCC |
| | | CTGCGTCCGGAGGCATGTAGACCCGCAGCTGGTGGGGCCGTGCATACC |
| | | CGGGGTCTTGACTTCGCCTGCGATATCTACATTTGGGCCCCTCTGGCT |
| | | GGTACTTGCGGGGTCCTGCTGCTTTCACTCGTGATCACTCTTTACTGT |
| | | AAGCGCGGTCGGAAGAAGCTGCTGTACATCTTTAAGCAACCCTTCATG |
| | | AGGCCTGTGCAGACTACTCAAGAGGAGGACGGCTGTTCATGCCGGTTC |
| | | CCAGAGGAGGAGGAAGGCGGCTGCGAACTGCGCGTGAAATTCAGCCGC |
| | | AGCGCAGATGCTCCAGCCTACAAGCAGGGGCAGAACCAGCTCTACAAC |
| | | GAACTCAATCTTGGTCGGAGAGAGGAGTACGACGTGCTGGACAAGCGG |
| | | AGAGGACGGGACCCAGAAATGGGCGGGAAGCCGCGCAGAAAGAATCCC |
| | | CAAGAGGGCCTGTACAACGAGCTCCAAAAGGATAAGATGGCAGAAGCC |
| | | TATAGCGAGATTGGTATGAAAGGGGAACGCAGAAGAGGCAAAGGCCAC |
| | | GACGGACTGTACCAGGGACTCAGCACCGCCACCAAGGACACCTATGAC |
| | | GCTCTTCACATGCAGGCCCTGCCGCCTCGG |

BCMA_EBB-C1978-G1

| | | |
|---|---|---|
| BCMA_EBB- | 438 | EVQLVETGGGLVQPGGSLRLSCAASGITFSRYPMSWVRQAPGKG |
| C1978-G1- | | LEWVSGISDSGVSTYYADSAKGRFTISRDNSKNTLFLQMSSLRDE |
| aa | | DTAVYYCVTRAGSEASDIWGQGTMVTVSSGGGGSGGGGSGGG |
| ScFv | | GSEIVLTQSPATLSLSPGERATLSCRASQSVSNSLAWYQQKPGQA |
| domain | | PRLLIYDASSRATGIPDRFSGSGSGTDFTLTISRLEPEDFAIYYCQQ |
| | | FGTSSGLTFGGGTKLEIK |
| BCMA_EBB- | 439 | GAAGTGCAACTGGTGGAAACCGGTGGCGGCCTGGTGCAGCCTGGAGGA |
| C1978-G1- | | TCATTGAGGCTGTCATGCGCGGCCAGCGGTATTACCTTCTCCCGGTAC |
| nt | | CCCATGTCCTGGGTCAGACAGGCCCCGGGGAAAGGGCTTGAATGGGTG |
| ScFv | | TCCGGGATCTCGGACTCCGGTGTCAGCACTTACTACGCCGACTCCGCC |
| domain | | AAGGGACGCTTCACCATTTCCCGGGACAACTCGAAGAACACCCTGTTC |
| | | CTCCAAATGAGCTCCCTCCGGGACGAGGATACTGCAGTGTACTACTGC |
| | | GTGACCCGCGCCGGGTCCGAGGCGTCTGACATTTGGGGACAGGGCACT |
| | | ATGGTCACCGTGTCGTCCGGCGGAGGGGGCTCGGGAGGCGGTGGCAGC |
| | | GGAGGAGGAGGGTCCGAGATCGTGCTGACCCAATCCCCGGCCACCCTC |
| | | TCGCTGAGCCCTGGAGAAAGGGCAACCTTGTCCTGTCGCGCGAGCCAG |
| | | TCCGTGAGCAACTCCCTGGCCTGGTACCAGCAGAAGCCCGGACAGGCT |
| | | CCGAGACTTCTGATCTACGACGCTTCGAGCCGGGCCACTGGAATCCCC |
| | | GACCGCTTTTCGGGGTCCGGCTCAGGAACCGATTTCACCCTGACAATC |
| | | TCACGGCTGGAGCCAGAGGATTTCGCCATCTATTACTGCCAGCAGTTC |
| | | GGTACTTCCTCCGGCCTGACTTTCGGAGGCGGCACGAAGCTCGAAATC |
| | | AAG |
| BCMA_EBB- | 440 | EVQLVETGGGLVQPGGSLRLSCAASGITFSRYPMSWVRQAPGKGLEWV |
| C1978-G1- | | SGISDSGVSTYYADSAKGRFTISRDNSKNTLFLQMSSLRDEDTAVYYC |
| aa | | VTRAGSEASDIWGQGTMVTVSS |
| VH | | |
| BCMA_EBB- | 441 | EIVLTQSPATLSLSPGERATLSCRASQSVSNSLAWYQQKPGQAPRLLI |
| C1978-G1- | | YDASSRATGIPDRFSGSGSGTDFTLTISRLEPEDFAIYYCQQFGTSSG |
| aa | | LTFGGGTKLEIK |
| VL | | |
| BCMA_EBB- | 442 | MALPVTALLLPLALLLHAARPEVQLVETGGGLVQPGGSLRLSCA |
| C1978-G1- | | ASGITFSRYPMSWVRQAPGKGLEWVSGISDSGVSTYYADSAKGR |
| aa | | FTISRDNSKNTLFLQMSSLRDEDTAVYYCVTRAGSEASDIWGQG |
| Full CART | | TMVTVSSGGGGSGGGGSGGGGSEIVLTQSPATLSLSPGERATLSC |
| | | RASQSVSNSLAWYQQKPGQAPRLLIYDASSRATGIPDRFSGSGSG |
| | | TDFTLTISRLEPEDFAIYYCQQFGTSSGLTFGGGTKLEIKTTTPAPR |
| | | PPTPAPTIASQPLSLRPEACRPAAGGAVHTRGLDFACDIYIWAPL |
| | | AGTCGVLLLSLVITLYCKRGRKKLLYIFKQPFMRPVQTTQEEDG |
| | | CSCRFPEEEEGGCELRVKFSRSADAPAYKQGQNQLYNELNLGRR |
| | | EEYDVLDKRRGRDPEMGGKPRRKNPQEGLYNELQKDKMAEAY |
| | | SEIGMKGERRRGKGHDGLYQGLSTATKDTYDALHMQALPPR |
| BCMA_EBB- | 443 | ATGGCCCTCCCTGTCACCGCCCTGCTGCTTCCGCTGGCTCTTCTGCTC |
| C1978-G1- | | CACGCCGCTCGGCCCGAAGTGCAACTGGTGGAAACCGGTGGCGGCCTG |
| nt | | GTGCAGCCTGGAGGATCATTGAGGCTGTCATGCGCGGCCAGCGGTATT |
| Full CART | | ACCTTCTCCCGGTACCCCATGTCCTGGGTCAGACAGGCCCCGGGGAAA |
| | | GGGCTTGAATGGGTGTCCGGGATCTCGGACTCCGGTGTCAGCACTTAC |
| | | TACGCCGACTCCGCCAAGGGACGCTTCACCATTTCCCGGGACAACTCG |
| | | AAGAACACCCTGTTCCTCCAAATGAGCTCCCTCCGGGACGAGGATACT |
| | | GCAGTGTACTACTGCGTGACCCGCGCCGGGTCCGAGGCGTCTGACATT |
| | | TGGGGACAGGGCACTATGGTCACCGTGTCGTCCGGCGGAGGGGGCTCG |
| | | GGAGGCGGTGGCAGCGGAGGAGGAGGGTCCGAGATCGTGCTGACCCAA |
| | | TCCCCGGCCACCCTCTCGCTGAGCCCTGGAGAAAGGGCAACCTTGTCC |
| | | TGTCGCGCGAGCCAGTCCGTGAGCAACTCCCTGGCCTGGTACCAGCAG |
| | | AAGCCCGGACAGGCTCCGAGACTTCTGATCTACGACGCTTCGAGCCGG |
| | | GCCACTGGAATCCCCGACCGCTTTTCGGGGTCCGGCTCAGGAACCGAT |
| | | TTCACCCTGACAATCTCACGGCTGGAGCCAGAGGATTTCGCCATCTAT |
| | | TACTGCCAGCAGTTCGGTACTTCCTCCGGCCTGACTTTCGGAGGCGGC |
| | | ACGAAGCTCGAAATCAAGACCACTACCCCAGCACCGAGGCCACCCACC |
| | | CCGGCTCCTACCATCGCCTCCCAGCCTCTGTCCCTGCGTCCGGAGGCA |
| | | TGTAGACCCGCAGCTGGTGGGGCCGTGCATACCCGGGGTCTTGACTTC |
| | | GCCTGCGATATCTACATTTGGGCCCCTCTGGCTGGTACTTGCGGGGTC |
| | | CTGCTGCTTTCACTCGTGATCACTCTTTACTGTAAGCGCGGTCGGAAG |
| | | AAGCTGCTGTACATCTTTAAGCAACCCTTCATGAGGCCTGTGCAGACT |
| | | ACTCAAGAGGAGGACGGCTGTTCATGCCGGTTCCCAGAGGAGGAGGAA |
| | | GGCGGCTGCGAACTGCGCGTGAAATTCAGCCGCAGCGCAGATGCTCCA |
| | | GCCTACAAGCAGGGGCAGAACCAGCTCTACAACGAACTCAATCTTGGT |
| | | CGGAGAGAGGAGTACGACGTGCTGGACAAGCGGAGAGGACGGGACCCA |
| | | GAAATGGGCGGGAAGCCGCGCAGAAAGAATCCCCAAGAGGGCCTGTAC |
| | | AACGAGCTCCAAAAGGATAAGATGGCAGAAGCCTATAGCGAGATTGGT |
| | | ATGAAAGGGGAACGCAGAAGAGGCAAAGGCCACGACGGACTGTACCAG |
| | | GGACTCAGCACCGCCACCAAGGACACCTATGACGCTCTTCACATGCAG |
| | | GCCCTGCCGCCTCGG |

BCMA_EBB-C1979-C1

| | | |
|---|---|---|
| BCMA_EBB- | 444 | QVQLVESGGGLVQPGGSLRLSCAASGFTFSSYAMSWVRQAPGKGLEWV |
| C1979-C1- | | SAISGSGGSTYYADSVKGRFTISRDNAKNSLYLQMNSLRAEDTAIYYC |
| aa | | ARATYKRELRYYYGMDVWGQGTMVTVSSGGGGSGGGGSGGGGSEIVMT |
| ScFv | | QSPGTVSLSPGERATLSCRASQSVSSSFLAWYQQKPGQAPRLLIYGAS |
| domain | | SRATGIPDRFSGSGSGTDFTLTISRLEPEDSAVYYCQQYHSSPSWTFG |
| | | QGTRLEIK |
| BCMA_EBB- | 445 | CAAGTGCAGCTCGTGGAATCGGGTGGCGGACTGGTGCAGCCGGGGGGC |
| C1979-C1- | | TCACTTAGACTGTCCTGCGCGGCCAGCGGATTCACTTTCTCCTCCTAC |
| nt | | GCCATGTCCTGGGTCAGACAGGCCCCTGGAAAGGGCCTGGAATGGGTG |
| ScFv | | TCCGCAATCAGCGGCAGCGGCGGCTCGACCTATTACGCGGATTCAGTG |
| domain | | AAGGGCAGATTCACCATTTCCCGGGACAACGCCAAGAACTCCTTGTAC |
| | | CTTCAAATGAACTCCCTCCGCGCGGAAGATACCGCAATCTACTACTGC |
| | | GCTCGGGCCACTTACAAGAGGGAACTGCGCTACTACTACGGGATGGAC |
| | | GTCTGGGGCCAGGGAACCATGGTCACCGTGTCCAGCGGAGGAGGAGGA |
| | | TCGGGAGGAGGCGGTAGCGGGGGTGGAGGGTCGGAGATCGTGATGACC |
| | | CAGTCCCCCGGCACTGTGTCGCTGTCCCCCGGCGAACGGGCCACCCTG |
| | | TCATGTCGGGCCAGCCAGTCAGTGTCGTCAAGCTTCCTCGCCTGGTAC |
| | | CAGCAGAAACCGGGACAAGCTCCCCGCCTGCTGATCTACGGAGCCAGC |
| | | AGCCGGGCCACCGGTATTCCTGACCGGTTCTCCGGTTCGGGGTCCGGG |
| | | ACCGACTTTACTCTGACTATCTCTCGCCTCGAGCCAGAGGACTCCGCC |
| | | GTGTATTACTGCCAGCAGTACCACTCCTCCCCGTCCTGGACGTTCGGA |
| | | CAGGGCACAAGGCTGGAGATTAAG |
| BCMA_EBB- | 446 | QVQLVESGGGLVQPGGSLRLSCAASGFTFSSYAMSWVRQAPGKGLEWV |
| C1979-C1- | | SAISGSGGSTYYADSVKGRFTISRDNAKNSLYLQMNSLRAEDTAIYYC |
| aa | | ARATYKRELRYYYGMDVWGQGTMVTVSS |
| VH | | |
| BCMA_EBB- | 447 | EIVMTQSPGTVSLSPGERATLSCRASQSVSSSFLAWYQQKPGQAPRLL |
| C1979-C1- | | IYGASSRATGIPDRFSGSGSGTDFTLTISRLEPEDSAVYYCQQYHSSP |
| aa | | SWTFGQGTRLEIK |
| VL | | |
| BCMA_EBB- | 448 | MALPVTALLLPLALLLHAARPQVQLVESGGGLVQPGGSLRLSCAASGF |
| C1979-C1- | | TFSSYAMSWVRQAPGKGLEWVSAISGSGGSTYYADSVKGRFTISRDNA |
| aa | | KNSLYLQMNSLRAEDTAIYYCARATYKRELRYYYGMDVWGQGTMVTVS |
| Full CART | | SGGGGSGGGGSGGGGSEIVMTQSPGTVSLSPGERATLSCRASQSVSSS |
| | | FLAWYQQKPGQAPRLLIYGASSRATGIPDRFSGSGSGTDFTLTISRLE |
| | | PEDSAVYYCQQYHSSPSWTFGQGTRLEIKTTTPAPRPPTPAPTIASQP |
| | | LSLRPEACRPAAGGAVHTRGLDFACDIYIWAPLAGTCGVLLLSLVITL |
| | | YCKRGRKKLLYIFKQPFMRPVQTTQEEDGCSCRFPEEEEGGCELRVKF |
| | | SRSADAPAYKQGQNQLYNELNLGRREEYDVLDKRRGRDPEMGGKPRRK |
| | | NPQEGLYNELQKDKMAEAYSEIGMKGERRRGKGHDGLYQGLSTATKDT |
| | | YDALHMQALPPR |
| BCMA_EBB- | 449 | ATGGCCCTCCCTGTCACCGCCCTGCTGCTTCCGCTGGCTCTTCTGCTC |
| C1979-C1- | | CACGCCGCTCGGCCCCAAGTGCAGCTCGTGGAATCGGGTGGCGGACTG |
| nt | | GTGCAGCCGGGGGGCTCACTTAGACTGTCCTGCGCGGCCAGCGGATTC |
| Full CART | | ACTTTCTCCTCCTACGCCATGTCCTGGGTCAGACAGGCCCCTGGAAAG |
| | | GGCCTGGAATGGGTGTCCGCAATCAGCGGCAGCGGCGGCTCGACCTAT |
| | | TACGCGGATTCAGTGAAGGGCAGATTCACCATTTCCCGGGACAACGCC |
| | | AAGAACTCCTTGTACCTTCAAATGAACTCCCTCCGCGCGGAAGATACC |
| | | GCAATCTACTACTGCGCTCGGGCCACTTACAAGAGGGAACTGCGCTAC |
| | | TACTACGGGATGGACGTCTGGGGCCAGGGAACCATGGTCACCGTGTCC |
| | | AGCGGAGGAGGAGGATCGGGAGGAGGCGGTAGCGGGGGTGGAGGGTCG |
| | | GAGATCGTGATGACCCAGTCCCCCGGCACTGTGTCGCTGTCCCCCGGC |
| | | GAACGGGCCACCCTGTCATGTCGGGCCAGCCAGTCAGTGTCGTCAAGC |
| | | TTCCTCGCCTGGTACCAGCAGAAACCGGGACAAGCTCCCCGCCTGCTG |
| | | ATCTACGGAGCCAGCAGCCGGGCCACCGGTATTCCTGACCGGTTCTCC |
| | | GGTTCGGGGTCCGGGACCGACTTTACTCTGACTATCTCTCGCCTCGAG |
| | | CCAGAGGACTCCGCCGTGTATTACTGCCAGCAGTACCACTCCTCCCCG |
| | | TCCTGGACGTTCGGACAGGGCACAAGGCTGGAGATTAAGACCACTACC |
| | | CCAGCACCGAGGCCACCCACCCCGGCTCCTACCATCGCCTCCCAGCCT |
| | | CTGTCCCTGCGTCCGGAGGCATGTAGACCCGCAGCTGGTGGGGCCGTG |
| | | CATACCCGGGGTCTTGACTTCGCCTGCGATATCTACATTTGGGCCCCT |
| | | CTGGCTGGTACTTGCGGGGTCCTGCTGCTTTCACTCGTGATCACTCTT |
| | | TACTGTAAGCGCGGTCGGAAGAAGCTGCTGTACATCTTTAAGCAACCC |
| | | TTCATGAGGCCTGTGCAGACTACTCAAGAGGAGGACGGCTGTTCATGC |
| | | CGGTTCCCAGAGGAGGAGGAAGGCGGCTGCGAACTGCGCGTGAAATTC |
| | | AGCCGCAGCGCAGATGCTCCAGCCTACAAGCAGGGGCAGAACCAGCTC |
| | | TACAACGAACTCAATCTTGGTCGGAGAGAGGAGTACGACGTGCTGGAC |
| | | AAGCGGAGAGGACGGGACCCAGAAATGGGCGGGAAGCCGCGCAGAAAG |
| | | AATCCCCAAGAGGGCCTGTACAACGAGCTCCAAAAGGATAAGATGGCA |
| | | GAAGCCTATAGCGAGATTGGTATGAAAGGGGAACGCAGAAGAGGCAAA |
| | | GGCCACGACGGACTGTACCAGGGACTCAGCACCGCCACCAAGGACACC |
| | | TATGACGCTCTTCACATGCAGGCCCTGCCGCCTCGG |

BCMA_EBB-C1978-C7

| | | |
|---|---|---|
| BCMA_EBB- | 450 | EVQLVETGGGLVQPGGSLRLSCAASGFTFSSYAMSWVRQAPGKGLEWV |
| C1978-C7- | | SAISGSGGSTYYADSVKGRFTISRDNSKNTLYLQMNTLKAEDTAVYYC |
| aa | | ARATYKRELRYYYGMDVWGQGTTVTVSSGGGGSGGGGSGGGGSEIVLT |
| ScFv | | QSPSTLSLSPGESATLSCRASQSVSTTFLAWYQQKPGQAPRLLIYGSS |
| domain | | NRATGIPDRFSGSGSGTDFTLTIRRLEPEDFAVYYCQQYHSSPSWTFG |
| | | QGTKVEIK |
| BCMA_EBB- | 451 | GAGGTGCAGCTTGTGGAAACCGGTGGCGGACTGGTGCAGCCCGGAGGA |
| C1978-C7- | | AGCCTCAGGCTGTCCTGCGCCGCGTCCGGCTTCACCTTCTCCTCGTAC |
| nt | | GCCATGTCCTGGGTCCGCCAGGCCCCCGGAAAGGGCCTGGAATGGGTG |
| ScFv | | TCCGCCATCTCTGGAAGCGGAGGTTCCACGTACTACGCGGACAGCGTC |
| domain | | AAGGGAAGGTTCACAATCTCCCGCGATAATTCGAAGAACACTCTGTAC |
| | | CTTCAAATGAACACCCTGAAGGCCGAGGACACTGCTGTGTACTACTGC |
| | | GCACGGGCCACCTACAAGAGAGAGCTCCGGTACTACTACGGAATGGAC |
| | | GTCTGGGGCCAGGGAACTACTGTGACCGTGTCCTCGGGAGGGGGTGGC |
| | | TCCGGGGGGGGCGGCTCCGGCGGAGGCGGTTCCGAGATTGTGCTGACC |
| | | CAGTCACCTTCAACTCTGTCGCTGTCCCCGGGAGAGAGCGCTACTCTG |
| | | AGCTGCCGGGCCAGCCAGTCCGTGTCCACCACCTTCCTCGCCTGGTAT |
| | | CAGCAGAAGCCGGGGCAGGCACCACGGCTCTTGATCTACGGGTCAAGC |
| | | AACAGAGCGACCGGAATTCCTGACCGCTTCTCGGGGAGCGGTTCAGGC |
| | | ACCGACTTCACCCTGACTATCCGGCGCCTGGAACCCGAAGATTTCGCC |
| | | GTGTATTACTGTCAACAGTACCACTCCTCGCCGTCCTGGACCTTTGGC |
| | | CAAGGAACCAAAGTGGAAATCAAG |
| BCMA_EBB- | 452 | EVQLVETGGGLVQPGGSLRLSCAASGFTFSSYAMSWVRQAPGKGLEWV |
| C1978-C7- | | SAISGSGGSTYYADSVKGRFTISRDNSKNTLYLQMNTLKAEDTAVYYC |
| aa | | ARATYKRELRYYYGMDVWGQGTTVTVSS |
| VH | | |
| BCMA_EBB- | 453 | EIVLTQSPSTLSLSPGESATLSCRASQSVSTTFLAWYQQKPGQAPRLL |
| C1978-C7- | | IYGSSNRATGIPDRFSGSGSGTDFTLTIRRLEPEDFAVYYCQQYHSSP |
| aa | | SWTFGQGTKVEIK |
| VL | | |
| BCMA_EBB- | 454 | MALPVTALLLPLALLLHAARPEVQLVETGGGLVQPGGSLRLSCAASGF |
| C1978-C7- | | TFSSYAMSWVRQAPGKGLEWVSAISGSGGSTYYADSVKGRFTISRDNS |
| aa | | KNTLYLQMNTLKAEDTAVYYCARATYKRELRYYYGMDVWGQGTTVTVS |
| Full CART | | SGGGGSGGGGSGGGGSEIVLTQSPSTLSLSPGESATLSCRASQSVSTT |
| | | FLAWYQQKPGQAPRLLIYGSSNRATGIPDRFSGSGSGTDFTLTIRRLE |
| | | PEDFAVYYCQQYHSSPSWTFGQGTKVEIKTTTPAPRPPTPAPTIASQP |
| | | LSLRPEACRPAAGGAVHTRGLDFACDIYIWAPLAGTCGVLLLSLVITL |
| | | YCKRGRKKLLYIFKQPFMRPVQTTQEEDGCSCRFPEEEEGGCELRVKF |
| | | SRSADAPAYKQGQNQLYNELNLGRREEYDVLDKRRGRDPEMGGKPRRK |
| | | NPQEGLYNELQKDKMAEAYSEIGMKGERRRGKGHDGLYQGLSTATKDT |
| | | YDALHMQALPPR |
| BCMA_EBB- | 455 | ATGGCCCTCCCTGTCACCGCCCTGCTGCTTCCGCTGGCTCTTCTGCTC |
| C1978-C7- | | CACGCCGCTCGGCCCGAGGTGCAGCTTGTGGAAACCGGTGGCGGACTG |
| nt | | GTGCAGCCCGGAGGAAGCCTCAGGCTGTCCTGCGCCGCGTCCGGCTTC |
| Full CART | | ACCTTCTCCTCGTACGCCATGTCCTGGGTCCGCCAGGCCCCCGGAAAG |
| | | GGCCTGGAATGGGTGTCCGCCATCTCTGGAAGCGGAGGTTCCACGTAC |
| | | TACGCGGACAGCGTCAAGGGAAGGTTCACAATCTCCCGCGATAATTCG |
| | | AAGAACACTCTGTACCTTCAAATGAACACCCTGAAGGCCGAGGACACT |
| | | GCTGTGTACTACTGCGCACGGGCCACCTACAAGAGAGAGCTCCGGTAC |
| | | TACTACGGAATGGACGTCTGGGGCCAGGGAACTACTGTGACCGTGTCC |
| | | TCGGGAGGGGGTGGCTCCGGGGGGGGCGGCTCCGGCGGAGGCGGTTCC |
| | | GAGATTGTGCTGACCCAGTCACCTTCAACTCTGTCGCTGTCCCCGGGA |
| | | GAGAGCGCTACTCTGAGCTGCCGGGCCAGCCAGTCCGTGTCCACCACC |
| | | TTCCTCGCCTGGTATCAGCAGAAGCCGGGGCAGGCACCACGGCTCTTG |
| | | ATCTACGGGTCAAGCAACAGAGCGACCGGAATTCCTGACCGCTTCTCG |
| | | GGGAGCGGTTCAGGCACCGACTTCACCCTGACTATCCGGCGCCTGGAA |
| | | CCCGAAGATTTCGCCGTGTATTACTGTCAACAGTACCACTCCTCGCCG |
| | | TCCTGGACCTTTGGCCAAGGAACCAAAGTGGAAATCAAGACCACTACC |
| | | CCAGCACCGAGGCCACCCACCCCGGCTCCTACCATCGCCTCCCAGCCT |
| | | CTGTCCCTGCGTCCGGAGGCATGTAGACCCGCAGCTGGTGGGGCCGTG |
| | | CATACCCGGGGTCTTGACTTCGCCTGCGATATCTACATTTGGGCCCCT |
| | | CTGGCTGGTACTTGCGGGGTCCTGCTGCTTTCACTCGTGATCACTCTT |
| | | TACTGTAAGCGCGGTCGGAAGAAGCTGCTGTACATCTTTAAGCAACCC |
| | | TTCATGAGGCCTGTGCAGACTACTCAAGAGGAGGACGGCTGTTCATGC |
| | | CGGTTCCCAGAGGAGGAGGAAGGCGGCTGCGAACTGCGCGTGAAATTC |
| | | AGCCGCAGCGCAGATGCTCCAGCCTACAAGCAGGGGCAGAACCAGCTC |
| | | TACAACGAACTCAATCTTGGTCGGAGAGAGGAGTACGACGTGCTGGAC |
| | | AAGCGGAGAGGACGGGACCCAGAAATGGGCGGGAAGCCGCGCAGAAAG |
| | | AATCCCCAAGAGGGCCTGTACAACGAGCTCCAAAAGGATAAGATGGCA |
| | | GAAGCCTATAGCGAGATTGGTATGAAAGGGGAACGCAGAAGAGGCAAA |
| | | GGCCACGACGGACTGTACCAGGGACTCAGCACCGCCACCAAGGACACC |
| | | TATGACGCTCTTCACATGCAGGCCCTGCCGCCTCGG |

BCMA_EBB-C1978-D10

| | | |
|---|---|---|
| BCMA_EBB- | 456 | EVQLVETGGGLVQPGRSLRLSCAASGFTFDDYAMHWVRQAPGKGLEWV |
| C1978- | | SGISWNSGSIGYADSVKGRFTISRDNAKNSLYLQMNSLRDEDTAVYYC |
| D10 - aa | | ARVGKAVPDVWGQGTTVTVSSGGGGSGGGGSGGGGSDIVMTQTPSSLS |
| ScFv | | ASVGDRVTITCRASQSISSYLNWYQQKPGKAPKLLIYAASSLQSGVPS |
| domain | | RFSGSGSGTDFTLTISSLQPEDFATYYCQQSYSTPYSFGQGTRLEIK |
| BCMA_EBB- | 457 | GAAGTGCAGCTCGTGGAAACTGGAGGTGGACTCGTGCAGCCTGGACGG |
| C1978- | | TCGCTGCGGCTGAGCTGCGCTGCATCCGGCTTCACCTTCGACGATTAT |
| D10- nt | | GCCATGCACTGGGTCAGACAGGCGCCAGGGAAGGGACTTGAGTGGGTG |
| ScFv | | TCCGGTATCAGCTGGAATAGCGGCTCAATCGGATACGCGGACTCCGTG |
| domain | | AAGGGAAGGTTCACCATTTCCCGCGACAACGCCAAGAACTCCCTGTAC |
| | | TTGCAAATGAACAGCCTCCGGGATGAGGACACTGCCGTGTACTACTGC |
| | | GCCCGCGTCGGAAAAGCTGTGCCCGACGTCTGGGGCCAGGGAACCACT |
| | | GTGACCGTGTCCAGCGGCGGGGGTGGATCGGGCGGTGGAGGGTCCGGT |
| | | GGAGGGGGCTCAGATATTGTGATGACCCAGACCCCCTCGTCCCTGTCC |
| | | GCCTCGGTCGGCGACCGCGTGACTATCACATGTAGAGCCTCGCAGAGC |
| | | ATCTCCAGCTACCTGAACTGGTATCAGCAGAAGCCGGGGAAGGCCCCG |
| | | AAGCTCCTGATCTACGCGGCATCATCACTGCAATCGGGAGTGCCGAGC |
| | | CGGTTTTCCGGGTCCGGCTCCGGCACCGACTTCACGCTGACCATTTCT |
| | | TCCCTGCAACCCGAGGACTTCGCCACTTACTACTGCCAGCAGTCCTAC |
| | | TCCACCCCTTACTCCTTCGGCCAAGGAACCAGGCTGGAAATCAAG |
| BCMA_EBB- | 458 | EVQLVETGGGLVQPGRSLRLSCAASGFTFDDYAMHWVRQAPGKGLEWV |
| C1978- | | SGISWNSGSIGYADSVKGRFTISRDNAKNSLYLQMNSLRDEDTAVYYC |
| D10 - aa | | ARVGKAVPDVWGQGTTVTVSS |
| VH | | |
| BCMA_EBB- | 459 | DIVMTQTPSSLSASVGDRVTITCRASQSISSYLNWYQQKPGKAPKLLI |
| C1978- | | YAASSLQSGVPSRFSGSGSGTDFTLTISSLQPEDFATYYCQQSYSTPY |
| D10- aa | | SFGQGTRLEIK |
| VL | | |
| BCMA_EBB- | 460 | MALPVTALLLPLALLLHAARPEVQLVETGGGLVQPGRSLRLSCAASGF |
| C1978- | | TFDDYAMHWVRQAPGKGLEWVSGISWNSGSIGYADSVKGRFTISRDNA |
| D10 - aa | | KNSLYLQMNSLRDEDTAVYYCARVGKAVPDVWGQGTTVTVSSGGGGSG |
| Full CART | | GGGSGGGGSDIVMTQTPSSLSASVGDRVTITCRASQSISSYLNWYQQK |
| | | PGKAPKLLIYAASSLQSGVPSRFSGSGSGTDFTLTISSLQPEDFATYY |
| | | CQQSYSTPYSFGQGTRLEIKTTTPAPRPPTPAPTIASQPLSLRPEACR |
| | | PAAGGAVHTRGLDFACDIYIWAPLAGTCGVLLLSLVITLYCKRGRKKL |
| | | LYIFKQPFMRPVQTTQEEDGCSCRFPEEEEGGCELRVKFSRSADAPAY |
| | | KQGQNQLYNELNLGRREEYDVLDKRRGRDPEMGGKPRRKNPQEGLYNE |
| | | LQKDKMAEAYSEIGMKGERRRGKGHDGLYQGLSTATKDTYDALHMQAL |
| | | PPR |
| BCMA_EBB- | 461 | ATGGCCCTCCCTGTCACCGCCCTGCTGCTTCCGCTGGCTCTTCTGCTC |
| C1978- | | CACGCCGCTCGGCCCGAAGTGCAGCTCGTGGAAACTGGAGGTGGACTC |
| D10 - nt | | GTGCAGCCTGGACGGTCGCTGCGGCTGAGCTGCGCTGCATCCGGCTTC |
| Full CART | | ACCTTCGACGATTATGCCATGCACTGGGTCAGACAGGCGCCAGGGAAG |
| | | GGACTTGAGTGGGTGTCCGGTATCAGCTGGAATAGCGGCTCAATCGGA |
| | | TACGCGGACTCCGTGAAGGGAAGGTTCACCATTTCCCGCGACAACGCC |
| | | AAGAACTCCCTGTACTTGCAAATGAACAGCCTCCGGGATGAGGACACT |
| | | GCCGTGTACTACTGCGCCCGCGTCGGAAAAGCTGTGCCCGACGTCTGG |
| | | GGCCAGGGAACCACTGTGACCGTGTCCAGCGGCGGGGGTGGATCGGGC |
| | | GGTGGAGGGTCCGGTGGAGGGGGCTCAGATATTGTGATGACCCAGACC |
| | | CCCTCGTCCCTGTCCGCCTCGGTCGGCGACCGCGTGACTATCACATGT |
| | | AGAGCCTCGCAGAGCATCTCCAGCTACCTGAACTGGTATCAGCAGAAG |
| | | CCGGGGAAGGCCCCGAAGCTCCTGATCTACGCGGCATCATCACTGCAA |
| | | TCGGGAGTGCCGAGCCGGTTTTCCGGGTCCGGCTCCGGCACCGACTTC |
| | | ACGCTGACCATTTCTTCCCTGCAACCCGAGGACTTCGCCACTTACTAC |
| | | TGCCAGCAGTCCTACTCCACCCCTTACTCCTTCGGCCAAGGAACCAGG |
| | | CTGGAAATCAAGACCACTACCCCAGCACCGAGGCCACCCACCCCGGCT |
| | | CCTACCATCGCCTCCCAGCCTCTGTCCCTGCGTCCGGAGGCATGTAGA |
| | | CCCGCAGCTGGTGGGGCCGTGCATACCCGGGGTCTTGACTTCGCCTGC |
| | | GATATCTACATTTGGGCCCCTCTGGCTGGTACTTGCGGGGTCCTGCTG |
| | | CTTTCACTCGTGATCACTCTTTACTGTAAGCGCGGTCGGAAGAAGCTG |
| | | CTGTACATCTTTAAGCAACCCTTCATGAGGCCTGTGCAGACTACTCAA |
| | | GAGGAGGACGGCTGTTCATGCCGGTTCCCAGAGGAGGAGGAAGGCGGC |
| | | TGCGAACTGCGCGTGAAATTCAGCCGCAGCGCAGATGCTCCAGCCTAC |
| | | AAGCAGGGGCAGAACCAGCTCTACAACGAACTCAATCTTGGTCGGAGA |
| | | GAGGAGTACGACGTGCTGGACAAGCGGAGAGGACGGGACCCAGAAATG |
| | | GGCGGGAAGCCGCGCAGAAAGAATCCCCAAGAGGGCCTGTACAACGAG |
| | | CTCCAAAAGGATAAGATGGCAGAAGCCTATAGCGAGATTGGTATGAAA |
| | | GGGGAACGCAGAAGAGGCAAAGGCCACGACGGACTGTACCAGGGACTC |
| | | AGCACCGCCACCAAGGACACCTATGACGCTCTTCACATGCAGGCCCTG |
| | | CCGCCTCGG |

BCMA_EBB-C1979-C12

| | | |
|---|---|---|
| BCMA_EBB- | 462 | EVQLVESGGGLVQPGRSLRLSCTASGFTFDDYAMHWVRQRPGKGLEWV |
| C1979- | | ASINWKGNSLAYGDSVKGRFAISRDNAKNTVFLQMNSLRTEDTAVYYC |
| C12- aa | | ASHQGVAYYNYAMDVWGRGTLVTVSSGGGGSGGGGSGGGGSEIVLTQS |
| ScFv | | PGTLSLSPGERATLSCRATQSIGSSFLAWYQQRPGQAPRLLIYGASQR |
| domain | | ATGIPDRFSGRGSGTDFTLTISRVEPEDSAVYYCQHYESSPSWTFGQG |
| | | TKVEIK |
| BCMA_EBB- | 463 | GAAGTGCAGCTCGTGGAGAGCGGGGGAGGATTGGTGCAGCCCGGAAGG |
| C1979- | | TCCCTGCGGCTCTCCTGCACTGCGTCTGGCTTCACCTTCGACGACTAC |
| C12 - nt | | GCGATGCACTGGGTCAGACAGCGCCCGGGAAAGGGCCTGGAATGGGTC |
| ScFv | | GCCTCAATCAACTGGAAGGGAAACTCCCTGGCCTATGGCGACAGCGTG |
| domain | | AAGGGCCGCTTCGCCATTTCGCGCGACAACGCCAAGAACACCGTGTTT |
| | | CTGCAAATGAATTCCCTGCGGACCGAGGATACCGCTGTGTACTACTGC |
| | | GCCAGCCACCAGGGCGTGGCATACTATAACTACGCCATGGACGTGTGG |
| | | GGAAGAGGGACGCTCGTCACCGTGTCCTCCGGGGGCGGTGGATCGGGT |
| | | GGAGGAGGAAGCGGTGGCGGGGGCAGCGAAATCGTGCTGACTCAGAGC |
| | | CCGGGAACTCTTTCACTGTCCCCGGGAGAACGGGCCACTCTCTCGTGC |
| | | CGGGCCACCCAGTCCATCGGCTCCTCCTTCCTTGCCTGGTACCAGCAG |
| | | AGGCCAGGACAGGCGCCCCGCCTGCTGATCTACGGTGCTTCCCAACGC |
| | | GCCACTGGCATTCCTGACCGGTTCAGCGGCAGAGGGTCGGGAACCGAT |
| | | TTCACACTGACCATTTCCCGGGTGGAGCCCGAAGATTCGGCAGTCTAC |
| | | TACTGTCAGCATTACGAGTCCTCCCCTTCATGGACCTTCGGTCAAGGG |
| | | ACCAAAGTGGAGATCAAG |
| BCMA_EBB- | 464 | EVQLVESGGGLVQPGRSLRLSCTASGFTFDDYAMHWVRQRPGKGLEWV |
| C1979- | | ASINWKGNSLAYGDSVKGRFAISRDNAKNTVFLQMNSLRTEDTAVYYC |
| C12 - aa | | ASHQGVAYYNYAMDVWGRGTLVTVSS |
| VH | | |
| BCMA_EBB- | 465 | EIVLTQSPGTLSLSPGERATLSCRATQSIGSSFLAWYQQRPGQAPRLL |
| C1979- | | IYGASQRATGIPDRFSGRGSGTDFTLTISRVEPEDSAVYYCQHYESSP |
| C12 - aa | | SWTFGQGTKVEIK |
| VL | | |
| BCMA_EBB- | 466 | MALPVTALLLPLALLLHAARPEVQLVESGGGLVQPGRSLRLSCTASGF |
| C1979- | | TFDDYAMHWVRQRPGKGLEWVASINWKGNSLAYGDSVKGRFAISRDNA |
| C12 - aa | | KNTVFLQMNSLRTEDTAVYYCASHQGVAYYNYAMDVWGRGTLVTVSSG |
| Full CART | | GGGSGGGGSGGGGSEIVLTQSPGTLSLSPGERATLSCRATQSIGSSFL |
| | | AWYQQRPGQAPRLLIYGASQRATGIPDRFSGRGSGTDFTLTISRVEPE |
| | | DSAVYYCQHYESSPSWTFGQGTKVEIKTTTPAPRPPTPAPTIASQPLS |
| | | LRPEACRPAAGGAVHTRGLDFACDIYIWAPLAGTCGVLLLSLVITLYC |
| | | KRGRKKLLYIFKQPFMRPVQTTQEEDGCSCRFPEEEEGGCELRVKFSR |
| | | SADAPAYKQGQNQLYNELNLGRREEYDVLDKRRGRDPEMGGKPRRKNP |
| | | QEGLYNELQKDKMAEAYSEIGMKGERRRGKGHDGLYQGLSTATKDTYD |
| | | ALHMQALPPR |
| BCMA_EBB- | 467 | ATGGCCCTCCCTGTCACCGCCCTGCTGCTTCCGCTGGCTCTTCTGCTC |
| C1979- | | CACGCCGCTCGGCCCGAAGTGCAGCTCGTGGAGAGCGGGGGAGGATTG |
| C12 - nt | | GTGCAGCCCGGAAGGTCCCTGCGGCTCTCCTGCACTGCGTCTGGCTTC |
| Full CART | | ACCTTCGACGACTACGCGATGCACTGGGTCAGACAGCGCCCGGGAAAG |
| | | GGCCTGGAATGGGTCGCCTCAATCAACTGGAAGGGAAACTCCCTGGCC |
| | | TATGGCGACAGCGTGAAGGGCCGCTTCGCCATTTCGCGCGACAACGCC |
| | | AAGAACACCGTGTTTCTGCAAATGAATTCCCTGCGGACCGAGGATACC |
| | | GCTGTGTACTACTGCGCCAGCCACCAGGGCGTGGCATACTATAACTAC |
| | | GCCATGGACGTGTGGGGAAGAGGGACGCTCGTCACCGTGTCCTCCGGG |
| | | GGCGGTGGATCGGGTGGAGGAGGAAGCGGTGGCGGGGGCAGCGAAATC |
| | | GTGCTGACTCAGAGCCCGGGAACTCTTTCACTGTCCCCGGGAGAACGG |
| | | GCCACTCTCTCGTGCCGGGCCACCCAGTCCATCGGCTCCTCCTTCCTT |
| | | GCCTGGTACCAGCAGAGGCCAGGACAGGCGCCCCGCCTGCTGATCTAC |
| | | GGTGCTTCCCAACGCGCCACTGGCATTCCTGACCGGTTCAGCGGCAGA |
| | | GGGTCGGGAACCGATTTCACACTGACCATTTCCCGGGTGGAGCCCGAA |
| | | GATTCGGCAGTCTACTACTGTCAGCATTACGAGTCCTCCCCTTCATGG |
| | | ACCTTCGGTCAAGGGACCAAAGTGGAGATCAAGACCACTACCCCAGCA |
| | | CCGAGGCCACCCACCCCGGCTCCTACCATCGCCTCCCAGCCTCTGTCC |
| | | CTGCGTCCGGAGGCATGTAGACCCGCAGCTGGTGGGGCCGTGCATACC |
| | | CGGGGTCTTGACTTCGCCTGCGATATCTACATTTGGGCCCCTCTGGCT |
| | | GGTACTTGCGGGGTCCTGCTGCTTTCACTCGTGATCACTCTTTACTGT |
| | | AAGCGCGGTCGGAAGAAGCTGCTGTACATCTTTAAGCAACCCTTCATG |
| | | AGGCCTGTGCAGACTACTCAAGAGGAGGACGGCTGTTCATGCCGGTTC |
| | | CCAGAGGAGGAGGAAGGCGGCTGCGAACTGCGCGTGAAATTCAGCCGC |
| | | AGCGCAGATGCTCCAGCCTACAAGCAGGGGCAGAACCAGCTCTACAAC |
| | | GAACTCAATCTTGGTCGGAGAGAGGAGTACGACGTGCTGGACAAGCGG |
| | | AGAGGACGGGACCCAGAAATGGGCGGGAAGCCGCGCAGAAAGAATCCC |
| | | CAAGAGGGCCTGTACAACGAGCTCCAAAAGGATAAGATGGCAGAAGCC |
| | | TATAGCGAGATTGGTATGAAAGGGGAACGCAGAAGAGGCAAAGGCCAC |
| | | GACGGACTGTACCAGGGACTCAGCACCGCCACCAAGGACACCTATGAC |
| | | GCTCTTCACATGCAGGCCCTGCCGCCTCGG |

BCMA_EBB-C1980-G4

| | | |
|---|---|---|
| BCMA_EBB- | 468 | EVQLVESGGGLVQPGGSLRLSCAASGFTFSSYAMSWVRQAPGK |
| C1980- | | GLEWVSAISGSGGSTYYADSVKGRFTISRDNSKNTLYLQMNSLR |
| G4- aa | | AEDTAVYYCAKVVRDGMDVWGQGTTVTVSSGGGGSGGGGSG |
| ScFv | | GGGSEIVLTQSPATLSLSPGERATLSCRASQSVSSSYLAWYQQKP |
| domain | | GQAPRLLIYGASSRATGIPDRFSGNGSGTDFTLTISRLEPEDFAVY |
| | | YCQQYGSPPRFTFGPGTKVDIK |
| BCMA_EBB- | 469 | GAGGTGCAGTTGGTCGAAAGCGGGGGCGGGCTTGTGCAGCCTGGCGGA |
| C1980- | | TCACTGCGGCTGTCCTGCGCGGCATCAGGCTTCACGTTTTCTTCCTAC |
| G4- nt | | GCCATGTCCTGGGTGCGCCAGGCCCCTGGAAAGGGACTGGAATGGGTG |
| ScFv | | TCCGCGATTTCGGGGTCCGGCGGGAGCACCTACTACGCCGATTCCGTG |
| domain | | AAGGGCCGCTTCACTATCTCGCGGGACAACTCCAAGAACACCCTCTAC |
| | | CTCCAAATGAATAGCCTGCGGGCCGAGGATACCGCCGTCTACTATTGC |
| | | GCTAAGGTCGTGCGCGACGGAATGGACGTGTGGGGACAGGGTACCACC |
| | | GTGACAGTGTCCTCGGGGGGAGGCGGTAGCGGCGGAGGAGGAAGCGGT |
| | | GGTGGAGGTTCCGAGATTGTGCTGACTCAATCACCCGCGACCCTGAGC |
| | | CTGTCCCCCGGCGAAAGGGCCACTCTGTCCTGTCGGGCCAGCCAATCA |
| | | GTCTCCTCCTCGTACCTGGCCTGGTACCAGCAGAAGCCAGGACAGGCT |
| | | CCGAGACTCCTTATCTATGGCGCATCCTCCCGCGCCACCGGAATCCCG |
| | | GATAGGTTCTCGGGAAACGGATCGGGGACCGACTTCACTCTCACCATC |
| | | TCCCGGCTGGAACCGGAGGACTTCGCCGTGTACTACTGCCAGCAGTAC |
| | | GGCAGCCCGCCTAGATTCACTTTCGGCCCCGGCACCAAAGTGGACATC |
| | | AAG |
| BCMA_EBB- | 470 | EVQLVESGGGLVQPGGSLRLSCAASGFTFSSYAMSWVRQAPGKGLEWV |
| C1980- | | SAISGSGGSTYYADSVKGRFTISRDNSKNTLYLQMNSLRAEDTAVYYC |
| G4- aa | | AKVVRDGMDVWGQGTTVTVSS |
| VH | | |
| BCMA_EBB- | 471 | EIVLTQSPATLSLSPGERATLSCRASQSVSSSYLAWYQQKPGQAPRLL |
| C1980- | | IYGASSRATGIPDRFSGNGSGTDFTLTISRLEPEDFAVYYCQQYGSPP |
| G4- aa | | RFTEGPGTKVDIK |
| VL | | |
| BCMA_EBB- | 472 | MALPVTALLLPLALLLHAARPEVQLVESGGGLVQPGGSLRLSCA |
| C1980- | | ASGFTFSSYAMSWVRQAPGKGLEWVSAISGSGGSTYYADSVKG |
| G4- aa | | RFTISRDNSKNTLYLQMNSLRAEDTAVYYCAKVVRDGMDVWG |
| Full CART | | QGTTVTVSSGGGGSGGGGSGGGGSEIVLTQSPATLSLSPGERATL |
| | | SCRASQSVSSSYLAWYQQKPGQAPRLLIYGASSRATGIPDRFSGN |
| | | GSGTDFTLTISRLEPEDFAVYYCQQYGSPPRFTFGPGTKVDIKTTT |
| | | PAPRPPTPAPTIASQPLSLRPEACRPAAGGAVHTRGLDFACDIYIW |
| | | APLAGTCGVLLLSLVITLYCKRGRKKLLYIFKQPFMRPVQTTQEE |
| | | DGCSCRFPEEEEGGCELRVKFSRSADAPAYKQGQNQLYNELNLG |
| | | RREEYDVLDKRRGRDPEMGGKPRRKNPQEGLYNELQKDKMAE |
| | | AYSEIGMKGERRRGKGHDGLYQGLSTATKDTYDALHMQALPPR |
| BCMA_EBB- | 473 | ATGGCCCTCCCTGTCACCGCCCTGCTGCTTCCGCTGGCTCTTCTGCTC |
| C1980- | | CACGCCGCTCGGCCCGAGGTGCAGTTGGTCGAAAGCGGGGGCGGGCTT |
| G4- nt | | GTGCAGCCTGGCGGATCACTGCGGCTGTCCTGCGCGGCATCAGGCTTC |
| Full CART | | ACGTTTTCTTCCTACGCCATGTCCTGGGTGCGCCAGGCCCCTGGAAAG |
| | | GGACTGGAATGGGTGTCCGCGATTTCGGGGTCCGGCGGGAGCACCTAC |
| | | TACGCCGATTCCGTGAAGGGCCGCTTCACTATCTCGCGGGACAACTCC |
| | | AAGAACACCCTCTACCTCCAAATGAATAGCCTGCGGGCCGAGGATACC |
| | | GCCGTCTACTATTGCGCTAAGGTCGTGCGCGACGGAATGGACGTGTGG |
| | | GGACAGGGTACCACCGTGACAGTGTCCTCGGGGGGAGGCGGTAGCGGC |
| | | GGAGGAGGAAGCGGTGGTGGAGGTTCCGAGATTGTGCTGACTCAATCA |
| | | CCCGCGACCCTGAGCCTGTCCCCCGGCGAAAGGGCCACTCTGTCCTGT |
| | | CGGGCCAGCCAATCAGTCTCCTCCTCGTACCTGGCCTGGTACCAGCAG |
| | | AAGCCAGGACAGGCTCCGAGACTCCTTATCTATGGCGCATCCTCCCGC |
| | | GCCACCGGAATCCCGGATAGGTTCTCGGGAAACGGATCGGGGACCGAC |
| | | TTCACTCTCACCATCTCCCGGCTGGAACCGGAGGACTTCGCCGTGTAC |
| | | TACTGCCAGCAGTACGGCAGCCCGCCTAGATTCACTTTCGGCCCCGGC |
| | | ACCAAAGTGGACATCAAGACCACTACCCCAGCACCGAGGCCACCCACC |
| | | CCGGCTCCTACCATCGCCTCCCAGCCTCTGTCCCTGCGTCCGGAGGCA |
| | | TGTAGACCCGCAGCTGGTGGGGCCGTGCATACCCGGGGTCTTGACTTC |
| | | GCCTGCGATATCTACATTTGGGCCCCTCTGGCTGGTACTTGCGGGGTC |
| | | CTGCTGCTTTCACTCGTGATCACTCTTTACTGTAAGCGCGGTCGGAAG |
| | | AAGCTGCTGTACATCTTTAAGCAACCCTTCATGAGGCCTGTGCAGACT |
| | | ACTCAAGAGGAGGACGGCTGTTCATGCCGGTTCCCAGAGGAGGAGGAA |
| | | GGCGGCTGCGAACTGCGCGTGAAATTCAGCCGCAGCGCAGATGCTCCA |
| | | GCCTACAAGCAGGGGCAGAACCAGCTCTACAACGAACTCAATCTTGGT |
| | | CGGAGAGAGGAGTACGACGTGCTGGACAAGCGGAGAGGACGGGACCCA |
| | | GAAATGGGCGGGAAGCCGCGCAGAAAGAATCCCCAAGAGGGCCTGTAC |
| | | AACGAGCTCCAAAAGGATAAGATGGCAGAAGCCTATAGCGAGATTGGT |
| | | ATGAAAGGGGAACGCAGAAGAGGCAAAGGCCACGACGGACTGTACCAG |
| | | GGACTCAGCACCGCCACCAAGGACACCTATGACGCTCTTCACATGCAG |
| | | GCCCTGCCGCCTCGG |

BCMA_EBB-C1980-D2

| | | |
|---|---|---|
| BCMA_EBB- | 474 | EVQLLESGGGLVQPGGSLRLSCAASGFTFSSYAMSWVRQAPGKGLEWV |
| C1980- | | SAISGSGGSTYYADSVKGRFTISRDNSKNTLYLQMNSLRAEDTAVYYC |
| D2- aa | | AKIPQTGTFDYWGQGTLVTVSSGGGGSGGGGSGGGGSEIVLTQSPGTL |
| ScFv | | SLSPGERATLSCRASQSVSSSYLAWYQQRPGQAPRLLIYGASSRATGI |
| domain | | PDRFSGSGSGTDFTLTISRLEPEDFAVYYCQHYGSSPSWTFGQGTRLE |
| | | IK |
| BCMA_EBB- | 475 | GAAGTGCAGCTGCTGGAGTCCGGCGGTGGATTGGTGCAACCGGGGGGA |
| C1980- | | TCGCTCAGACTGTCCTGTGCGGCGTCAGGCTTCACCTTCTCGAGCTAC |
| D2- nt | | GCCATGTCATGGGTCAGACAGGCCCCTGGAAAGGGTCTGGAATGGGTG |
| ScFv | | TCCGCCATTTCCGGGAGCGGGGGATCTACATACTACGCCGATAGCGTG |
| domain | | AAGGGCCGCTTCACCATTTCCCGGGACAACTCCAAGAACACTCTCTAT |
| | | CTGCAAATGAACTCCCTCCGCGCTGAGGACACTGCCGTGTACTACTGC |
| | | GCCAAAATCCCTCAGACCGGCACCTTCGACTACTGGGGACAGGGGACT |
| | | CTGGTCACCGTCAGCAGCGGTGGCGGAGGTTCGGGGGGAGGAGGAAGC |
| | | GGCGGCGGAGGGTCCGAGATTGTGCTGACCCAGTCACCCGGCACTTTG |
| | | TCCCTGTCGCCTGGAGAAAGGGCCACCCTTTCCTGCCGGGCATCCCAA |
| | | TCCGTGTCCTCCTCGTACCTGGCCTGGTACCAGCAGAGGCCCGGACAG |
| | | GCCCCACGGCTTCTGATCTACGGAGCAAGCAGCCGCGCGACCGGTATC |
| | | CCGGACCGGTTTTCGGGCTCGGGCTCAGGAACTGACTTCACCCTCACC |
| | | ATCTCCCGCCTGGAACCCGAAGATTTCGCTGTGTATTACTGCCAGCAC |
| | | TACGGCAGCTCCCCGTCCTGGACGTTCGGCCAGGGAACTCGGCTGGAG |
| | | ATCAAG |
| BCMA_EBB- | 476 | EVQLLESGGGLVQPGGSLRLSCAASGFTFSSYAMSWVRQAPGKGLEWV |
| C1980- | | SAISGSGGSTYYADSVKGRFTISRDNSKNTLYLQMNSLRAEDTAVYYC |
| D2- aa | | AKIPQTGTFDYWGQGTLVTVSS |
| VH | | |
| BCMA_EBB- | 477 | EIVLTQSPGTLSLSPGERATLSCRASQSVSSSYLAWYQQRPGQAPRLL |
| C1980- | | IYGASSRATGIPDRFSGSGSGTDFTLTISRLEPEDFAVYYCQHYGSSP |
| D2- aa | | SWTFGQGTRLEIK |
| VL | | |
| BCMA_EBB- | 478 | MALPVTALLLPLALLLHAARPEVQLLESGGGLVQPGGSLRLSCAASGF |
| C1980- | | TFSSYAMSWVRQAPGKGLEWVSAISGSGGSTYYADSVKGRFTISRDNS |
| D2- aa | | KNTLYLQMNSLRAEDTAVYYCAKIPQTGTFDYWGQGTLVTVSSGGGGS |
| Full CART | | GGGGSGGGGSEIVLTQSPGTLSLSPGERATLSCRASQSVSSSYLAWYQ |
| | | QRPGQAPRLLIYGASSRATGIPDRFSGSGSGTDFTLTISRLEPEDFAV |
| | | YYCQHYGSSPSWTFGQGTRLEIKTTTPAPRPPTPAPTIASQPLSLRPE |
| | | ACRPAAGGAVHTRGLDFACDIYIWAPLAGTCGVLLLSLVITLYCKRGR |
| | | KKLLYIFKQPFMRPVQTTQEEDGCSCRFPEEEEGGCELRVKFSRSADA |
| | | PAYKQGQNQLYNELNLGRREEYDVLDKRRGRDPEMGGKPRRKNPQEGL |
| | | YNELQKDKMAEAYSEIGMKGERRRGKGHDGLYQGLSTATKDTYDALHM |
| | | QALPPR |
| BCMA_EBB- | 479 | ATGGCCCTCCCTGTCACCGCCCTGCTGCTTCCGCTGGCTCTTCTGCTC |
| C1980- | | CACGCCGCTCGGCCCGAAGTGCAGCTGCTGGAGTCCGGCGGTGGATTG |
| D2- nt | | GTGCAACCGGGGGGATCGCTCAGACTGTCCTGTGCGGCGTCAGGCTTC |
| Full CART | | ACCTTCTCGAGCTACGCCATGTCATGGGTCAGACAGGCCCCTGGAAAG |
| | | GGTCTGGAATGGGTGTCCGCCATTTCCGGGAGCGGGGGATCTACATAC |
| | | TACGCCGATAGCGTGAAGGGCCGCTTCACCATTTCCCGGGACAACTCC |
| | | AAGAACACTCTCTATCTGCAAATGAACTCCCTCCGCGCTGAGGACACT |
| | | GCCGTGTACTACTGCGCCAAAATCCCTCAGACCGGCACCTTCGACTAC |
| | | TGGGGACAGGGGACTCTGGTCACCGTCAGCAGCGGTGGCGGAGGTTCG |
| | | GGGGGAGGAGGAAGCGGCGGCGGAGGGTCCGAGATTGTGCTGACCCAG |
| | | TCACCCGGCACTTTGTCCCTGTCGCCTGGAGAAAGGGCCACCCTTTCC |
| | | TGCCGGGCATCCCAATCCGTGTCCTCCTCGTACCTGGCCTGGTACCAG |
| | | CAGAGGCCCGGACAGGCCCCACGGCTTCTGATCTACGGAGCAAGCAGC |
| | | CGCGCGACCGGTATCCCGGACCGGTTTTCGGGCTCGGGCTCAGGAACT |
| | | GACTTCACCCTCACCATCTCCCGCCTGGAACCCGAAGATTTCGCTGTG |
| | | TATTACTGCCAGCACTACGGCAGCTCCCCGTCCTGGACGTTCGGCCAG |
| | | GGAACTCGGCTGGAGATCAAGACCACTACCCCAGCACCGAGGCCACCC |
| | | ACCCCGGCTCCTACCATCGCCTCCCAGCCTCTGTCCCTGCGTCCGGAG |
| | | GCATGTAGACCCGCAGCTGGTGGGGCCGTGCATACCCGGGGTCTTGAC |
| | | TTCGCCTGCGATATCTACATTTGGGCCCCTCTGGCTGGTACTTGCGGG |
| | | GTCCTGCTGCTTTCACTCGTGATCACTCTTTACTGTAAGCGCGGTCGG |
| | | AAGAAGCTGCTGTACATCTTTAAGCAACCCTTCATGAGGCCTGTGCAG |
| | | ACTACTCAAGAGGAGGACGGCTGTTCATGCCGGTTCCCAGAGGAGGAG |
| | | GAAGGCGGCTGCGAACTGCGCGTGAAATTCAGCCGCAGCGCAGATGCT |
| | | CCAGCCTACAAGCAGGGGCAGAACCAGCTCTACAACGAACTCAATCTT |
| | | GGTCGGAGAGAGGAGTACGACGTGCTGGACAAGCGGAGAGGACGGGAC |
| | | CCAGAAATGGGCGGGAAGCCGCGCAGAAAGAATCCCCAAGAGGGCCTG |
| | | TACAACGAGCTCCAAAAGGATAAGATGGCAGAAGCCTATAGCGAGATT |
| | | GGTATGAAAGGGGAACGCAGAAGAGGCAAAGGCCACGACGGACTGTAC |
| | | CAGGGACTCAGCACCGCCACCAAGGACACCTATGACGCTCTTCACATG |
| | | CAGGCCCTGCCGCCTCGG |

BCMA_EBB-C1978-A10

| | | |
|---|---|---|
| BCMA_EBB- | 480 | EVQLVETGGGLVQPGGSLRLSCAASGFTFSSYAMSWVRQAPGK |
| C1978- | | GLEWVSAISGSGGSTYYADSVKGRFTMSRENDKNSVFLQMNSL |
| A10- aa | | RVEDTGVYYCARANYKRELRYYYGMDVWGQGTMVTVSSGGG |
| ScFv | | GSGGGGSGGGGSEIVMTQSPGTLSLSPGESATLSCRASQRVASN |
| domain | | YLAWYQHKPGQAPSLLISGASSRATGVPDRFSGSGSGTDFTLAIS |
| | | RLEPEDSAVYYCQHYDSSPSWTFGQGTKVEIK |
| BCMA_EBB- | 481 | GAAGTGCAACTGGTGGAAACCGGTGGAGGACTCGTGCAGCCTGGCGGC |
| C1978- | | AGCCTCCGGCTGAGCTGCGCCGCTTCGGGATTCACCTTTTCCTCCTAC |
| A10- nt | | GCGATGTCTTGGGTCAGACAGGCCCCCGGAAAGGGGCTGGAATGGGTG |
| ScFv | | TCAGCCATCTCCGGCTCCGGCGGATCAACGTACTACGCCGACTCCGTG |
| domain | | AAAGGCCGGTTCACCATGTCGCGCGAGAATGACAAGAACTCCGTGTTC |
| | | CTGCAAATGAACTCCCTGAGGGTGGAGGACACCGGAGTGTACTATTGT |
| | | GCGCGCGCCAACTACAAGAGAGAGCTGCGGTACTACTACGGAATGGAC |
| | | GTCTGGGGACAGGGAACTATGGTGACCGTGTCATCCGGTGGAGGGGGA |
| | | AGCGGCGGTGGAGGCAGCGGGGGCGGGGGTTCAGAAATTGTCATGACC |
| | | CAGTCCCCGGGAACTCTTTCCCTCTCCCCCGGGGAATCCGCGACTTTG |
| | | TCCTGCCGGGCCAGCCAGCGCGTGGCCTCGAACTACCTCGCATGGTAC |
| | | CAGCATAAGCCAGGCCAAGCCCCTTCCCTGCTGATTTCCGGGGCTAGC |
| | | AGCCGCGCCACTGGCGTGCCGGATAGGTTCTCGGGAAGCGGCTCGGGT |
| | | ACCGATTTCACCCTGGCAATCTCGCGGCTGGAACCGGAGGATTCGGCC |
| | | GTGTACTACTGCCAGCACTATGACTCATCCCCCTCCTGGACATTCGGA |
| | | CAGGGCACCAAGGTCGAGATCAAG |
| BCMA_EBB- | 482 | EVQLVETGGGLVQPGGSLRLSCAASGFTFSSYAMSWVRQAPGKGLEWV |
| C1978- | | SAISGSGGSTYYADSVKGRFTMSRENDKNSVFLQMNSLRVEDTGVYYC |
| A10- aa | | ARANYKRELRYYYGMDVWGQGTMVTVSS |
| VH | | |
| BCMA_EBB- | 483 | EIVMTQSPGTLSLSPGESATLSCRASQRVASNYLAWYQHKPGQAPSLL |
| C1978- | | ISGASSRATGVPDRFSGSGSGTDFTLAISRLEPEDSAVYYCQHYDSSP |
| A10- aa | | SWTFGQGTKVEIK |
| VL | | |
| BCMA_EBB- | 484 | MALPVTALLLPLALLLHAARPEVQLVETGGGLVQPGGSLRLSCA |
| C1978- | | ASGFTFSSYAMSWVRQAPGKGLEWVSAISGSGGSTYYADSVKG |
| A10- aa | | RFTMSRENDKNSVFLQMNSLRVEDTGVYYCARANYKRELRYY |
| Full CART | | YGMDVWGQGTMVTVSSGGGGSGGGGSGGGGSEIVMTQSPGTL |
| | | SLSPGESATLSCRASQRVASNYLAWYQHKPGQAPSLLISGASSRA |
| | | TGVPDRFSGSGSGTDFTLAISRLEPEDSAVYYCQHYDSSPSWTFG |
| | | QGTKVEIKTTTPAPRPPTPAPTIASQPLSLRPEACRPAAGGAVHTR |
| | | GLDFACDIYIWAPLAGTCGVLLLSLVITLYCKRGRKKLLYIFKQP |
| | | FMRPVQTTQEEDGCSCRFPEEEEGGCELRVKFSRSADAPAYKQG |
| | | QNQLYNELNLGRREEYDVLDKRRGRDPEMGGKPRRKNPQEGL |
| | | YNELQKDKMAEAYSEIGMKGERRRGKGHDGLYQGLSTATKDT |
| | | YDALHMQALPPR |
| BCMA_EBB- | 485 | ATGGCCCTCCCTGTCACCGCCCTGCTGCTTCCGCTGGCTCTTCTGCTC |
| C1978- | | CACGCCGCTCGGCCCGAAGTGCAACTGGTGGAAACCGGTGGAGGACTC |
| A10- nt | | GTGCAGCCTGGCGGCAGCCTCCGGCTGAGCTGCGCCGCTTCGGGATTC |
| Full CART | | ACCTTTTCCTCCTACGCGATGTCTTGGGTCAGACAGGCCCCCGGAAAG |
| | | GGGCTGGAATGGGTGTCAGCCATCTCCGGCTCCGGCGGATCAACGTAC |
| | | TACGCCGACTCCGTGAAAGGCCGGTTCACCATGTCGCGCGAGAATGAC |
| | | AAGAACTCCGTGTTCCTGCAAATGAACTCCCTGAGGGTGGAGGACACC |
| | | GGAGTGTACTATTGTGCGCGCGCCAACTACAAGAGAGAGCTGCGGTAC |
| | | TACTACGGAATGGACGTCTGGGGACAGGGAACTATGGTGACCGTGTCA |
| | | TCCGGTGGAGGGGGAAGCGGCGGTGGAGGCAGCGGGGGCGGGGGTTCA |
| | | GAAATTGTCATGACCCAGTCCCCGGGAACTCTTTCCCTCTCCCCCGGG |
| | | GAATCCGCGACTTTGTCCTGCCGGGCCAGCCAGCGCGTGGCCTCGAAC |
| | | TACCTCGCATGGTACCAGCATAAGCCAGGCCAAGCCCCTTCCCTGCTG |
| | | ATTTCCGGGGCTAGCAGCCGCGCCACTGGCGTGCCGGATAGGTTCTCG |
| | | GGAAGCGGCTCGGGTACCGATTTCACCCTGGCAATCTCGCGGCTGGAA |
| | | CCGGAGGATTCGGCCGTGTACTACTGCCAGCACTATGACTCATCCCCC |
| | | TCCTGGACATTCGGACAGGGCACCAAGGTCGAGATCAAGACCACTACC |
| | | CCAGCACCGAGGCCACCCACCCCGGCTCCTACCATCGCCTCCCAGCCT |
| | | CTGTCCCTGCGTCCGGAGGCATGTAGACCCGCAGCTGGTGGGGCCGTG |
| | | CATACCCGGGGTCTTGACTTCGCCTGCGATATCTACATTTGGGCCCCT |
| | | CTGGCTGGTACTTGCGGGGTCCTGCTGCTTTCACTCGTGATCACTCTT |
| | | TACTGTAAGCGCGGTCGGAAGAAGCTGCTGTACATCTTTAAGCAACCC |
| | | TTCATGAGGCCTGTGCAGACTACTCAAGAGGAGGACGGCTGTTCATGC |
| | | CGGTTCCCAGAGGAGGAGGAAGGCGGCTGCGAACTGCGCGTGAAATTC |
| | | AGCCGCAGCGCAGATGCTCCAGCCTACAAGCAGGGGCAGAACCAGCTC |
| | | TACAACGAACTCAATCTTGGTCGGAGAGAGGAGTACGACGTGCTGGAC |
| | | AAGCGGAGAGGACGGGACCCAGAAATGGGCGGGAAGCCGCGCAGAAAG |
| | | AATCCCCAAGAGGGCCTGTACAACGAGCTCCAAAAGGATAAGATGGCA |
| | | GAAGCCTATAGCGAGATTGGTATGAAAGGGGAACGCAGAAGAGGCAAA |
| | | GGCCACGACGGACTGTACCAGGGACTCAGCACCGCCACCAAGGACACC |
| | | TATGACGCTCTTCACATGCAGGCCCTGCCGCCTCGG |

BCMA_EBB-C1978-D4

| | | |
|---|---|---|
| BCMA_EBB- | 486 | EVQLLETGGGLVQPGGSLRLSCAASGFSFSSYAMSWVRQAPGKGLEWV |
| C1978- | | SAISGSGGSTYYADSVKGRFTISRDNSKNTLYLQMNSLRAEDTAVYYC |
| D4- aa | | AKALVGATGAFDIWGQGTLVTVSSGGGGSGGGGSGGGGSEIVLTQSPG |
| ScFv | | TLSLSPGERATLSCRASQSLSSNFLAWYQQKPGQAPGLLIYGASNWAT |
| domain | | GTPDRFSGSGSGTDFTLTITRLEPEDFAVYYCQYYGTSPMYTFGQGTK |
| | | VEIK |
| BCMA_EBB- | 487 | GAAGTGCAGCTGCTCGAAACCGGTGGAGGGCTGGTGCAGCCAGGGGGC |
| C1978- | | TCCCTGAGGCTTTCATGCGCCGCTAGCGGATTCTCCTTCTCCTCTTAC |
| D4- nt | | GCCATGTCGTGGGTCCGCCAAGCCCCTGGAAAAGGCCTGGAATGGGTG |
| ScFv | | TCCGCGATTTCCGGGAGCGGAGGTTCGACCTATTACGCCGACTCCGTG |
| domain | | AAGGGCCGCTTTACCATCTCCCGGGATAACTCCAAGAACACTCTGTAC |
| | | CTCCAAATGAACTCGCTGAGAGCCGAGGACACCGCCGTGTATTACTGC |
| | | GCGAAGGCGCTGGTCGGCGCGACTGGGGCATTCGACATCTGGGGACAG |
| | | GGAACTCTTGTGACCGTGTCGAGCGGAGGCGGCGGCTCCGGCGGAGGA |
| | | GGGAGCGGGGGCGGTGGTTCCGAAATCGTGTTGACTCAGTCCCCGGGA |
| | | ACCCTGAGCTTGTCACCCGGGGAGCGGGCCACTCTCTCCTGTCGCGCC |
| | | TCCCAATCGCTCTCATCCAATTTCCTGGCCTGGTACCAGCAGAAGCCC |
| | | GGACAGGCCCCGGGCCTGCTCATCTACGGCGCTTCAAACTGGGCAACG |
| | | GGAACCCCTGATCGGTTCAGCGGAAGCGGATCGGGTACTGACTTTACC |
| | | CTGACCATCACCAGACTGGAACCGGAGGACTTCGCCGTGTACTACTGC |
| | | CAGTACTACGGCACCTCCCCCATGTACACATTCGGACAGGGTACCAAG |
| | | GTCGAGATTAAG |
| BCMA_EBB- | 488 | EVQLLETGGGLVQPGGSLRLSCAASGFSFSSYAMSWVRQAPGKGLEWV |
| C1978- | | SAISGSGGSTYYADSVKGRFTISRDNSKNTLYLQMNSLRAEDTAVYYC |
| D4- aa | | AKALVGATGAFDIWGQGTLVTVSS |
| VH | | |
| BCMA_EBB- | 489 | EIVLTQSPGTLSLSPGERATLSCRASQSLSSNFLAWYQQKPGQAPGLL |
| C1978- | | IYGASNWATGTPDRFSGSGSGTDFTLTITRLEPEDFAVYYCQYYGTSP |
| D4- aa | | MYTFGQGTKVEIK |
| VL | | |
| BCMA_EBB- | 490 | MALPVTALLLPLALLLHAARPEVQLLETGGGLVQPGGSLRLSCAASGF |
| C1978- | | SFSSYAMSWVRQAPGKGLEWVSAISGSGGSTYYADSVKGRFTISRDNS |
| D4- aa | | KNTLYLQMNSLRAEDTAVYYCAKALVGATGAFDIWGQGTLVTVSSGGG |
| Full CART | | GSGGGGSGGGGSEIVLTQSPGTLSLSPGERATLSCRASQSLSSNFLAW |
| | | YQQKPGQAPGLLIYGASNWATGTPDRFSGSGSGTDFTLTITRLEPEDF |
| | | AVYYCQYYGTSPMYTFGQGTKVEIKTTTPAPRPPTPAPTIASQPLSLR |
| | | PEACRPAAGGAVHTRGLDFACDIYIWAPLAGTCGVLLLSLVITLYCKR |
| | | GRKKLLYIFKQPFMRPVQTTQEEDGCSCRFPEEEEGGCELRVKFSRSA |
| | | DAPAYKQGQNQLYNELNLGRREEYDVLDKRRGRDPEMGGKPRRKNPQE |
| | | GLYNELQKDKMAEAYSEIGMKGERRRGKGHDGLYQGLSTATKDTYDAL |
| | | HMQALPPR |
| BCMA_EBB- | 491 | ATGGCCCTCCCTGTCACCGCCCTGCTGCTTCCGCTGGCTCTTCTGCTC |
| C1978- | | CACGCCGCTCGGCCCGAAGTGCAGCTGCTCGAAACCGGTGGAGGGCTG |
| D4- nt | | GTGCAGCCAGGGGGCTCCCTGAGGCTTTCATGCGCCGCTAGCGGATTC |
| Full CART | | TCCTTCTCCTCTTACGCCATGTCGTGGGTCCGCCAAGCCCCTGGAAAA |
| | | GGCCTGGAATGGGTGTCCGCGATTTCCGGGAGCGGAGGTTCGACCTAT |
| | | TACGCCGACTCCGTGAAGGGCCGCTTTACCATCTCCCGGGATAACTCC |
| | | AAGAACACTCTGTACCTCCAAATGAACTCGCTGAGAGCCGAGGACACC |
| | | GCCGTGTATTACTGCGCGAAGGCGCTGGTCGGCGCGACTGGGGCATTC |
| | | GACATCTGGGGACAGGGAACTCTTGTGACCGTGTCGAGCGGAGGCGGC |
| | | GGCTCCGGCGGAGGAGGGAGCGGGGGCGGTGGTTCCGAAATCGTGTTG |
| | | ACTCAGTCCCCGGGAACCCTGAGCTTGTCACCCGGGGAGCGGGCCACT |
| | | CTCTCCTGTCGCGCCTCCCAATCGCTCTCATCCAATTTCCTGGCCTGG |
| | | TACCAGCAGAAGCCCGGACAGGCCCCGGGCCTGCTCATCTACGGCGCT |
| | | TCAAACTGGGCAACGGGAACCCCTGATCGGTTCAGCGGAAGCGGATCG |
| | | GGTACTGACTTTACCCTGACCATCACCAGACTGGAACCGGAGGACTTC |
| | | GCCGTGTACTACTGCCAGTACTACGGCACCTCCCCCATGTACACATTC |
| | | GGACAGGGTACCAAGGTCGAGATTAAGACCACTACCCCAGCACCGAGG |
| | | CCACCCACCCCGGCTCCTACCATCGCCTCCCAGCCTCTGTCCCTGCGT |
| | | CCGGAGGCATGTAGACCCGCAGCTGGTGGGGCCGTGCATACCCGGGGT |
| | | CTTGACTTCGCCTGCGATATCTACATTTGGGCCCCTCTGGCTGGTACT |
| | | TGCGGGGTCCTGCTGCTTTCACTCGTGATCACTCTTTACTGTAAGCGC |
| | | GGTCGGAAGAAGCTGCTGTACATCTTTAAGCAACCCTTCATGAGGCCT |
| | | GTGCAGACTACTCAAGAGGAGGACGGCTGTTCATGCCGGTTCCCAGAG |
| | | GAGGAGGAAGGCGGCTGCGAACTGCGCGTGAAATTCAGCCGCAGCGCA |
| | | GATGCTCCAGCCTACAAGCAGGGGCAGAACCAGCTCTACAACGAACTC |
| | | AATCTTGGTCGGAGAGAGGAGTACGACGTGCTGGACAAGCGGAGAGGA |
| | | CGGGACCCAGAAATGGGCGGGAAGCCGCGCAGAAAGAATCCCCAAGAG |
| | | GGCCTGTACAACGAGCTCCAAAAGGATAAGATGGCAGAAGCCTATAGC |
| | | GAGATTGGTATGAAAGGGGAACGCAGAAGAGGCAAAGGCCACGACGGA |
| | | CTGTACCAGGGACTCAGCACCGCCACCAAGGACACCTATGACGCTCTT |
| | | CACATGCAGGCCCTGCCGCCTCGG |

BCMA_EBB-C1980-A2

| | | |
|---|---|---|
| BCMA_EBB- | 492 | EVQLLESGGGLVQPGGSLRLSCAASGFTFSSYAMSWVRQAPGKGLEWV |
| C1980- | | SAISGSGGSTYYADSVKGRFTISRDNSKNTLYLQMNSLRAEDTAVYYC |
| A2- aa | | VLWFGEGFDPWGQGTLVTVSSGGGGSGGGGSGGGGSDIVLTQSPLSLP |
| ScFv | | VTPGEPASISCRSSQSLLHSNGYNYLDWYLQKPGQSPQLLIYLGSNRA |
| domain | | SGVPDRFSGSGSGTDFTLKISRVEAEDVGVYYCMQALQTPLTFGGGTK |
| | | VDIK |
| BCMA_EBB- | 493 | GAAGTGCAGCTGCTTGAGAGCGGTGGAGGTCTGGTGCAGCCCGGGGGA |
| C1980- | | TCACTGCGCCTGTCCTGTGCCGCGTCCGGTTTCACTTTCTCCTCGTAC |
| A2- nt | | GCCATGTCGTGGGTCAGACAGGCACCGGGAAAGGGACTGGAATGGGTG |
| ScFv | | TCAGCCATTTCGGGTTCGGGGGGCAGCACCTACTACGCTGACTCCGTG |
| domain | | AAGGGCCGGTTCACCATTTCCCGCGACAACTCCAAGAACACCTTGTAC |
| | | CTCCAAATGAACTCCCTGCGGGCCGAAGATACCGCCGTGTATTACTGC |
| | | GTGCTGTGGTTCGGAGAGGGATTCGACCCGTGGGGACAAGGAACACTC |
| | | GTGACTGTGTCATCCGGCGGAGGCGGCAGCGGTGGCGGCGGTTCCGGC |
| | | GGCGGCGGATCTGACATCGTGTTGACCCAGTCCCCTCTGAGCCTGCCG |
| | | GTCACTCCTGGCGAACCAGCCAGCATCTCCTGCCGGTCGAGCCAGTCC |
| | | CTCCTGCACTCCAATGGGTACAACTACCTCGATTGGTATCTGCAAAAG |
| | | CCGGGCCAGAGCCCCCAGCTGCTGATCTACCTTGGGTCAAACCGCGCT |
| | | TCCGGGGTGCCTGATAGATTCTCCGGGTCCGGGAGCGGAACCGACTTT |
| | | ACCCTGAAAATCTCGAGGGTGGAGGCCGAGGACGTCGGAGTGTACTAC |
| | | TGCATGCAGGCGCTCCAGACTCCCCTGACCTTCGGAGGAGGAACGAAG |
| | | GTCGACATCAAGA |
| BCMA_EBB- | 494 | EVQLLESGGGLVQPGGSLRLSCAASGFTFSSYAMSWVRQAPGKGLEWV |
| C1980- | | SAISGSGGSTYYADSVKGRFTISRDNSKNTLYLQMNSLRAEDTAVYYC |
| A2- aa | | VLWFGEGFDPWGQGTLVTVSS |
| VH | | |
| BCMA_EBB- | 495 | DIVLTQSPLSLPVTPGEPASISCRSSQSLLHSNGYNYLDWYLQKPGQS |
| C1980- | | PQLLIYLGSNRASGVPDRFSGSGSGTDFTLKISRVEAEDVGVYYCMQA |
| A2- aa | | LQTPLTFGGGTKVDIK |
| VL | | |
| BCMA_EBB- | 496 | MALPVTALLLPLALLLHAARPEVQLLESGGGLVQPGGSLRLSCAASGF |
| C1980- | | TFSSYAMSWVRQAPGKGLEWVSAISGSGGSTYYADSVKGRFTISRDNS |
| A2- aa | | KNTLYLQMNSLRAEDTAVYYCVLWFGEGFDPWGQGTLVTVSSGGGGSG |
| Full CART | | GGGSGGGGSDIVLTQSPLSLPVTPGEPASISCRSSQSLLHSNGYNYLD |
| | | WYLQKPGQSPQLLIYLGSNRASGVPDRFSGSGSGTDFTLKISRVEAED |
| | | VGVYYCMQALQTPLTFGGGTKVDIKTTTPAPRPPTPAPTIASQPLSLR |
| | | PEACRPAAGGAVHTRGLDFACDIYIWAPLAGTCGVLLLSLVITLYCKR |
| | | GRKKLLYIFKQPFMRPVQTTQEEDGCSCRFPEEEEGGCELRVKFSRSA |
| | | DAPAYKQGQNQLYNELNLGRREEYDVLDKRRGRDPEMGGKPRRKNPQE |
| | | GLYNELQKDKMAEAYSEIGMKGERRRGKGHDGLYQGLSTATKDTYDAL |
| | | HMQALPPR |
| BCMA_EBB- | 497 | ATGGCCCTCCCTGTCACCGCCCTGCTGCTTCCGCTGGCTCTTCTGCTC |
| C1980- | | CACGCCGCTCGGCCCGAAGTGCAGCTGCTTGAGAGCGGTGGAGGTCTG |
| A2- nt | | GTGCAGCCCGGGGGATCACTGCGCCTGTCCTGTGCCGCGTCCGGTTTC |
| Full CART | | ACTTTCTCCTCGTACGCCATGTCGTGGGTCAGACAGGCACCGGGAAAG |
| | | GGACTGGAATGGGTGTCAGCCATTTCGGGTTCGGGGGGCAGCACCTAC |
| | | TACGCTGACTCCGTGAAGGGCCGGTTCACCATTTCCCGCGACAACTCC |
| | | AAGAACACCTTGTACCTCCAAATGAACTCCCTGCGGGCCGAAGATACC |
| | | GCCGTGTATTACTGCGTGCTGTGGTTCGGAGAGGGATTCGACCCGTGG |
| | | GGACAAGGAACACTCGTGACTGTGTCATCCGGCGGAGGCGGCAGCGGT |
| | | GGCGGCGGTTCCGGCGGCGGCGGATCTGACATCGTGTTGACCCAGTCC |
| | | CCTCTGAGCCTGCCGGTCACTCCTGGCGAACCAGCCAGCATCTCCTGC |
| | | CGGTCGAGCCAGTCCCTCCTGCACTCCAATGGGTACAACTACCTCGAT |
| | | TGGTATCTGCAAAAGCCGGGCCAGAGCCCCCAGCTGCTGATCTACCTT |
| | | GGGTCAAACCGCGCTTCCGGGGTGCCTGATAGATTCTCCGGGTCCGGG |
| | | AGCGGAACCGACTTTACCCTGAAAATCTCGAGGGTGGAGGCCGAGGAC |
| | | GTCGGAGTGTACTACTGCATGCAGGCGCTCCAGACTCCCCTGACCTTC |
| | | GGAGGAGGAACGAAGGTCGACATCAAGACCACTACCCCAGCACCGAGG |
| | | CCACCCACCCCGGCTCCTACCATCGCCTCCCAGCCTCTGTCCCTGCGT |
| | | CCGGAGGCATGTAGACCCGCAGCTGGTGGGGCCGTGCATACCCGGGGT |
| | | CTTGACTTCGCCTGCGATATCTACATTTGGGCCCCTCTGGCTGGTACT |
| | | TGCGGGGTCCTGCTGCTTTCACTCGTGATCACTCTTTACTGTAAGCGC |
| | | GGTCGGAAGAAGCTGCTGTACATCTTTAAGCAACCCTTCATGAGGCCT |
| | | GTGCAGACTACTCAAGAGGAGGACGGCTGTTCATGCCGGTTCCCAGAG |
| | | GAGGAGGAAGGCGGCTGCGAACTGCGCGTGAAATTCAGCCGCAGCGCA |
| | | GATGCTCCAGCCTACAAGCAGGGGCAGAACCAGCTCTACAACGAACTC |
| | | AATCTTGGTCGGAGAGAGGAGTACGACGTGCTGGACAAGCGGAGAGGA |
| | | CGGGACCCAGAAATGGGCGGGAAGCCGCGCAGAAAGAATCCCCAAGAG |
| | | GGCCTGTACAACGAGCTCCAAAAGGATAAGATGGCAGAAGCCTATAGC |
| | | GAGATTGGTATGAAAGGGGAACGCAGAAGAGGCAAAGGCCACGACGGA |
| | | CTGTACCAGGGACTCAGCACCGCCACCAAGGACACCTATGACGCTCTT |
| | | CACATGCAGGCCCTGCCGCCTCGG |

BCMA_EBB-C1981-C3

| | | |
|---|---|---|
| BCMA_EBB- | 498 | QVQLVESGGGLVQPGGSLRLSCAASGFTFSSYAMSWVRQAPGKGLEWV |
| C1981- | | SAISGSGGSTYYADSVKGRFTISRDNSKNTLYLQMNSLRAEDTAVYYC |
| C3- aa | | AKVGYDSSGYYRDYYGMDVWGQGTTVTVSSGGGGSGGGGSGGGGSEIV |
| ScFv | | LTQSPGTLSLSPGERATLSCRASQSVSSSYLAWYQQKPGQAPRLLIYG |
| domain | | TSSRATGISDRFSGSGSGTDFTLTISRLEPEDFAVYYCQHYGNSPPKF |
| | | TFGPGTKLEIK |
| BCMA_EBB- | 499 | CAAGTGCAGCTCGTGGAGTCAGGCGGAGGACTGGTGCAGCCCGGGGGC |
| C1981- | | TCCCTGAGACTTTCCTGCGCGGCATCGGGTTTTACCTTCTCCTCCTAT |
| C3- nt | | GCTATGTCCTGGGTGCGCCAGGCCCCGGGAAAGGGACTGGAATGGGTG |
| ScFv | | TCCGCAATCAGCGGTAGCGGGGGCTCAACATACTACGCCGACTCCGTC |
| domain | | AAGGGTCGCTTCACTATTTCCCGGGACAACTCCAAGAATACCCTGTAC |
| | | CTCCAAATGAACAGCCTCAGGGCCGAGGATACTGCCGTGTACTACTGC |
| | | GCCAAAGTCGGATACGATAGCTCCGGTTACTACCGGGACTACTACGGA |
| | | ATGGACGTGTGGGGACAGGGCACCACCGTGACCGTGTCAAGCGGCGGA |
| | | GGCGGTTCAGGAGGGGGAGGCTCCGGCGGTGGAGGGTCCGAAATCGTC |
| | | CTGACTCAGTCGCCTGGCACTCTGTCGTTGTCCCCGGGGGAGCGCGCT |
| | | ACCCTGTCGTGTCGGGCGTCGCAGTCCGTGTCGAGCTCCTACCTCGCG |
| | | TGGTACCAGCAGAAGCCCGGACAGGCCCCTAGACTTCTGATCTACGGC |
| | | ACTTCTTCACGCGCCACCGGGATCAGCGACAGGTTCAGCGGCTCCGGC |
| | | TCCGGGACCGACTTCACCCTGACCATTAGCCGGCTGGAGCCTGAAGAT |
| | | TTCGCCGTGTATTACTGCCAACACTACGGAAACTCGCCGCCAAAGTTC |
| | | ACGTTCGGACCCGGAACCAAGCTGGAAATCAAG |
| BCMA_EBB- | 500 | QVQLVESGGGLVQPGGSLRLSCAASGFTFSSYAMSWVRQAPGKGLEWV |
| C1981- | | SAISGSGGSTYYADSVKGRFTISRDNSKNTLYLQMNSLRAEDTAVYYC |
| C3- aa | | AKVGYDSSGYYRDYYGMDVWGQGTTVTVSS |
| VH | | |
| BCMA_EBB- | 501 | EIVLTQSPGTLSLSPGERATLSCRASQSVSSSYLAWYQQKPGQAPRLL |
| C1981- | | IYGTSSRATGISDRFSGSGSGTDFTLTISRLEPEDFAVYYCQHYGNSP |
| C3- aa | | PKFTFGPGTKLEIK |
| VL | | |
| BCMA_EBB- | 502 | MALPVTALLLPLALLLHAARPQVQLVESGGGLVQPGGSLRLSCAASGF |
| C1981- | | TFSSYAMSWVRQAPGKGLEWVSAISGSGGSTYYADSVKGRFTISRDNS |
| C3- aa | | KNTLYLQMNSLRAEDTAVYYCAKVGYDSSGYYRDYYGMDVWGQGTTVT |
| Full CART | | VSSGGGGSGGGGSGGGGSEIVLTQSPGTLSLSPGERATLSCRASQSVS |
| | | SSYLAWYQQKPGQAPRLLIYGTSSRATGISDRFSGSGSGTDFTLTISR |
| | | LEPEDFAVYYCQHYGNSPPKFTFGPGTKLEIKTTTPAPRPPTPAPTIA |
| | | SQPLSLRPEACRPAAGGAVHTRGLDFACDIYIWAPLAGTCGVLLLSLV |
| | | ITLYCKRGRKKLLYIFKQPFMRPVQTTQEEDGCSCRFPEEEEGGCELR |
| | | VKFSRSADAPAYKQGQNQLYNELNLGRREEYDVLDKRRGRDPEMGGKP |
| | | RRKNPQEGLYNELQKDKMAEAYSEIGMKGERRRGKGHDGLYQGLSTAT |
| | | KDTYDALHMQALPPR |
| BCMA_EBB- | 503 | ATGGCCCTCCCTGTCACCGCCCTGCTGCTTCCGCTGGCTCTTCTGCTC |
| C1981- | | CACGCCGCTCGGCCCCAAGTGCAGCTCGTGGAGTCAGGCGGAGGACTG |
| C3- nt | | GTGCAGCCCGGGGGCTCCCTGAGACTTTCCTGCGCGGCATCGGGTTTT |
| Full CART | | ACCTTCTCCTCCTATGCTATGTCCTGGGTGCGCCAGGCCCCGGGAAAG |
| | | GGACTGGAATGGGTGTCCGCAATCAGCGGTAGCGGGGGCTCAACATAC |
| | | TACGCCGACTCCGTCAAGGGTCGCTTCACTATTTCCCGGGACAACTCC |
| | | AAGAATACCCTGTACCTCCAAATGAACAGCCTCAGGGCCGAGGATACT |
| | | GCCGTGTACTACTGCGCCAAAGTCGGATACGATAGCTCCGGTTACTAC |
| | | CGGGACTACTACGGAATGGACGTGTGGGGACAGGGCACCACCGTGACC |
| | | GTGTCAAGCGGCGGAGGCGGTTCAGGAGGGGGAGGCTCCGGCGGTGGA |
| | | GGGTCCGAAATCGTCCTGACTCAGTCGCCTGGCACTCTGTCGTTGTCC |
| | | CCGGGGGAGCGCGCTACCCTGTCGTGTCGGGCGTCGCAGTCCGTGTCG |
| | | AGCTCCTACCTCGCGTGGTACCAGCAGAAGCCCGGACAGGCCCCTAGA |
| | | CTTCTGATCTACGGCACTTCTTCACGCGCCACCGGGATCAGCGACAGG |
| | | TTCAGCGGCTCCGGCTCCGGGACCGACTTCACCCTGACCATTAGCCGG |
| | | CTGGAGCCTGAAGATTTCGCCGTGTATTACTGCCAACACTACGGAAAC |
| | | TCGCCGCCAAAGTTCACGTTCGGACCCGGAACCAAGCTGGAAATCAAG |
| | | ACCACTACCCCAGCACCGAGGCCACCCACCCCGGCTCCTACCATCGCC |
| | | TCCCAGCCTCTGTCCCTGCGTCCGGAGGCATGTAGACCCGCAGCTGGT |
| | | GGGGCCGTGCATACCCGGGGTCTTGACTTCGCCTGCGATATCTACATT |
| | | TGGGCCCCTCTGGCTGGTACTTGCGGGGTCCTGCTGCTTTCACTCGTG |
| | | ATCACTCTTTACTGTAAGCGCGGTCGGAAGAAGCTGCTGTACATCTTT |
| | | AAGCAACCCTTCATGAGGCCTGTGCAGACTACTCAAGAGGAGGACGGC |
| | | TGTTCATGCCGGTTCCCAGAGGAGGAGGAAGGCGGCTGCGAACTGCGC |
| | | GTGAAATTCAGCCGCAGCGCAGATGCTCCAGCCTACAAGCAGGGGCAG |
| | | AACCAGCTCTACAACGAACTCAATCTTGGTCGGAGAGAGGAGTACGAC |
| | | GTGCTGGACAAGCGGAGAGGACGGGACCCAGAAATGGGCGGGAAGCCG |
| | | CGCAGAAAGAATCCCCAAGAGGGCCTGTACAACGAGCTCCAAAAGGAT |
| | | AAGATGGCAGAAGCCTATAGCGAGATTGGTATGAAAGGGGAACGCAGA |
| | | AGAGGCAAAGGCCACGACGGACTGTACCAGGGACTCAGCACCGCCACC |
| | | AAGGACACCTATGACGCTCTTCACATGCAGGCCCTGCCGCCTCGG |

BCMA_EBB-C1978-G4

| | | |
|---|---|---|
| BCMA_EBB- | 504 | EVQLVESGGGLVQPGGSLRLSCAASGFTFSSYAMSWVRQAPGKGLEWV |
| C1978- | | SAISGSGGSTYYADSVKGRFTISRDNSKNTLYLQMNSLRAEDTAVYYC |
| G4- aa | | AKMGWSSGYLGAFDIWGQGTTVTVSSGGGGSGGGGSGGGGSEIVLTQS |
| ScFv | | PGTLSLSPGERATLSCRASQSVASSFLAWYQQKPGQAPRLLIYGASGR |
| domain | | ATGIPDRFSGSGSGTDFTLTISRLEPEDFAVYYCQHYGGSPRLTFGGG |
| | | TKVDIK |
| BCMA_EBB- | 505 | GAAGTCCAACTGGTGGAGTCCGGGGGAGGGCTCGTGCAGCCCGGAGGC |
| C1978- | | AGCCTTCGGCTGTCGTGCGCCGCCTCCGGGTTCACGTTCTCATCCTAC |
| G4- nt | | GCGATGTCGTGGGTCAGACAGGCACCAGGAAAGGGACTGGAATGGGTG |
| ScFv | | TCCGCCATTAGCGGCTCCGGCGGTAGCACCTACTATGCCGACTCAGTG |
| domain | | AAGGGAAGGTTCACTATCTCCCGCGACAACAGCAAGAACACCCTGTAC |
| | | CTCCAAATGAACTCTCTGCGGGCCGAGGATACCGCGGTGTACTATTGC |
| | | GCCAAGATGGGTTGGTCCAGCGGATACTTGGGAGCCTTCGACATTTGG |
| | | GGACAGGGCACTACTGTGACCGTGTCCTCCGGGGGTGGCGGATCGGGA |
| | | GGCGGCGGCTCGGGTGGAGGGGGTTCCGAAATCGTGTTGACCCAGTCA |
| | | CCGGGAACCCTCTCGCTGTCCCCGGGAGAACGGGCTACACTGTCATGT |
| | | AGAGCGTCCCAGTCCGTGGCTTCCTCGTTCCTGGCCTGGTACCAGCAG |
| | | AAGCCGGGACAGGCACCCCGCCTGCTCATCTACGGAGCCAGCGGCCGG |
| | | GCGACCGGCATCCCTGACCGCTTCTCCGGTTCCGGCTCGGGCACCGAC |
| | | TTTACTCTGACCATTAGCAGGCTTGAGCCCGAGGATTTTGCCGTGTAC |
| | | TACTGCCAACACTACGGGGGGAGCCCTCGCCTGACCTTCGGAGGCGGA |
| | | ACTAAGGTCGATATCAAAA |
| BCMA_EBB- | 506 | EVQLVESGGGLVQPGGSLRLSCAASGFTFSSYAMSWVRQAPGKGLEWV |
| C1978- | | SAISGSGGSTYYADSVKGRFTISRDNSKNTLYLQMNSLRAEDTAVYYC |
| G4- aa | | AKMGWSSGYLGAFDIWGQGTTVTVSS |
| VH | | |
| BCMA_EBB- | 507 | EIVLTQSPGTLSLSPGERATLSCRASQSVASSFLAWYQQKPGQAPRLL |
| C1978- | | IYGASGRATGIPDRFSGSGSGTDFTLTISRLEPEDFAVYYCQHYGGSP |
| G4- aa | | RLTFGGGTKVDIK |
| VL | | |
| BCMA_EBB- | 508 | MALPVTALLLPLALLLHAARPEVQLVESGGGLVQPGGSLRLSCAASGF |
| C1978- | | TFSSYAMSWVRQAPGKGLEWVSAISGSGGSTYYADSVKGRFTISRDNS |
| G4- aa | | KNTLYLQMNSLRAEDTAVYYCAKMGWSSGYLGAFDIWGQGTTVTVSSG |
| Full CART | | GGGSGGGGSGGGGSEIVLTQSPGTLSLSPGERATLSCRASQSVASSFL |
| | | AWYQQKPGQAPRLLIYGASGRATGIPDRFSGSGSGTDFTLTISRLEPE |
| | | DFAVYYCQHYGGSPRLTFGGGTKVDIKTTTPAPRPPTPAPTIASQPLS |
| | | LRPEACRPAAGGAVHTRGLDFACDIYIWAPLAGTCGVLLLSLVITLYC |
| | | KRGRKKLLYIFKQPFMRPVQTTQEEDGCSCRFPEEEEGGCELRVKFSR |
| | | SADAPAYKQGQNQLYNELNLGRREEYDVLDKRRGRDPEMGGKPRRKNP |
| | | QEGLYNELQKDKMAEAYSEIGMKGERRRGKGHDGLYQGLSTATKDTYD |
| | | ALHMQALPPR |
| BCMA_EBB- | 509 | ATGGCCCTCCCTGTCACCGCCCTGCTGCTTCCGCTGGCTCTTCTGCTC |
| C1978- | | CACGCCGCTCGGCCCGAAGTCCAACTGGTGGAGTCCGGGGGAGGGCTC |
| G4- nt | | GTGCAGCCCGGAGGCAGCCTTCGGCTGTCGTGCGCCGCCTCCGGGTTC |
| Full CART | | ACGTTCTCATCCTACGCGATGTCGTGGGTCAGACAGGCACCAGGAAAG |
| | | GGACTGGAATGGGTGTCCGCCATTAGCGGCTCCGGCGGTAGCACCTAC |
| | | TATGCCGACTCAGTGAAGGGAAGGTTCACTATCTCCCGCGACAACAGC |
| | | AAGAACACCCTGTACCTCCAAATGAACTCTCTGCGGGCCGAGGATACC |
| | | GCGGTGTACTATTGCGCCAAGATGGGTTGGTCCAGCGGATACTTGGGA |
| | | GCCTTCGACATTTGGGGACAGGGCACTACTGTGACCGTGTCCTCCGGG |
| | | GGTGGCGGATCGGGAGGCGGCGGCTCGGGTGGAGGGGGTTCCGAAATC |
| | | GTGTTGACCCAGTCACCGGGAACCCTCTCGCTGTCCCCGGGAGAACGG |
| | | GCTACACTGTCATGTAGAGCGTCCCAGTCCGTGGCTTCCTCGTTCCTG |
| | | GCCTGGTACCAGCAGAAGCCGGGACAGGCACCCCGCCTGCTCATCTAC |
| | | GGAGCCAGCGGCCGGGCGACCGGCATCCCTGACCGCTTCTCCGGTTCC |
| | | GGCTCGGGCACCGACTTTACTCTGACCATTAGCAGGCTTGAGCCCGAG |
| | | GATTTTGCCGTGTACTACTGCCAACACTACGGGGGGAGCCCTCGCCTG |
| | | ACCTTCGGAGGCGGAACTAAGGTCGATATCAAAACCACTACCCCAGCA |
| | | CCGAGGCCACCCACCCCGGCTCCTACCATCGCCTCCCAGCCTCTGTCC |
| | | CTGCGTCCGGAGGCATGTAGACCCGCAGCTGGTGGGGCCGTGCATACC |
| | | CGGGGTCTTGACTTCGCCTGCGATATCTACATTTGGGCCCCTCTGGCT |
| | | GGTACTTGCGGGGTCCTGCTGCTTTCACTCGTGATCACTCTTTACTGT |
| | | AAGCGCGGTCGGAAGAAGCTGCTGTACATCTTTAAGCAACCCTTCATG |
| | | AGGCCTGTGCAGACTACTCAAGAGGAGGACGGCTGTTCATGCCGGTTC |
| | | CCAGAGGAGGAGGAAGGCGGCTGCGAACTGCGCGTGAAATTCAGCCGC |
| | | AGCGCAGATGCTCCAGCCTACAAGCAGGGGCAGAACCAGCTCTACAAC |
| | | GAACTCAATCTTGGTCGGAGAGAGGAGTACGACGTGCTGGACAAGCGG |
| | | AGAGGACGGGACCCAGAAATGGGCGGGAAGCCGCGCAGAAAGAATCCC |
| | | CAAGAGGGCCTGTACAACGAGCTCCAAAAGGATAAGATGGCAGAAGCC |
| | | TATAGCGAGATTGGTATGAAAGGGGAACGCAGAAGAGGCAAAGGCCAC |
| | | GACGGACTGTACCAGGGACTCAGCACCGCCACCAAGGACACCTATGAC |
| | | GCTCTTCACATGCAGGCCCTGCCGCCTCGG |

TABLE 8
Additional exemplary BCMA CAR sequences

| | | SEQ |
|---|---|---|
| | | ID |
| Name | Sequence | NO: |
| A7D12.2 | QIQLVQSGPDLKKPGETVKLSCKASGYTFTNFGMNWVKQAPGKGFKWMAWINTYTGESYFA | 510 |
| VH | DDFKGRFAFSVETSATTAYLQINNLKTEDTATYFCARGEIYYGYDGGFAYWGQGTLVTVSA | |
| A7D12.2 | DVVMTQSHRFMSTSVGDRVSITCRASQDVNTAVSWYQQKPGQSPKLLIFSASYRYTGVPDR | 511 |
| VL | FTGSGSGADFTLTISSVQAEDLAVYYCQQHYSTPWTFGGGTKLDIK | |
| A7D12.2 | QIQLVQSGPDLKKPGETVKLSCKASGYTFTNFGMNWVKQAPGKGFKWMAWINTYTGESYFA | 512 |
| scFv | DDFKGRFAFSVETSATTAYLQINNLKTEDTATYFCARGEIYYGYDGGFAYWGQGTLVTVSA | |
| domain | GGGGSGGGGSGGGGSDVVMTQSHRFMSTSVGDRVSITCRASQDVNTAVSWYQQKPGQSPKL | |
| | LIFSASYRYTGVPDRFTGSGSGADFTLTISSVQAEDLAVYYCQQHYSTPWTFGGGTKLDIK | |
| A7D12.2 | QIQLVQSGPDLKKPGETVKLSCKASGYTFTNFGMNWVKQAPGKGFKWMAWINTYTGESYFA | 513 |
| Full | DDFKGRFAFSVETSATTAYLQINNLKTEDTATYFCARGEIYYGYDGGFAYWGQGTLVTVSA | |
| CART | GGGGSGGGGSGGGGSDVVMTQSHRFMSTSVGDRVSITCRASQDVNTAVSWYQQKPGQSPKL | |
| | LIFSASYRYTGVPDRFTGSGSGADFTLTISSVQAEDLAVYYCQQHYSTPWTFGGGTKLDIK | |
| | TTTPAPRPPTPAPTIASQPLSLRPEACRPAAGGAVHTRGLDFACDIYIWAPLAGTCGVLLL | |
| | SLVITLYCKRGRKKLLYIFKQPFMRPVQTTQEEDGCSCRFPEEEEGGCELRVKFSRSADAP | |
| | AYKQGQNQLYNELNLGRREEYDVLDKRRGRDPEMGGKPRRKNPQEGLYNELQKDKMAEAYS | |
| | EIGMKGERRRGKGHDGLYQGLSTATKDTYDALHMQALPPR | |
| C11D5.3 | QIQLVQSGPELKKPGETVKISCKASGYTFTDYSINWVKRAPGKGLKWMGWINTETREPAYA | 514 |
| VH | YDFRGRFAFSLETSASTAYLQINNLKYEDTATYFCALDYSYAMDYWGQGTSVTVSS | |
| C11D5.3 | DIVLTQSPASLAMSLGKRATISCRASESVSVIGAHLIHWYQQKPGQPPKLLIYLASNLETG | 515 |
| VL | VPARFSGSGSGTDFTLTIDPVEEDDVAIYSCLQSRIFPRTFGGGTKLEIK | |
| C11D5.3 | QIQLVQSGPELKKPGETVKISCKASGYTFTDYSINWVKRAPGKGLKWMGWINTETREPAYA | 516 |
| scFv | YDFRGRFAFSLETSASTAYLQINNLKYEDTATYFCALDYSYAMDYWGQGTSVTVSSGGGGS | |
| domain | GGGGSGGGGSQIQLVQSGPELKKPGETVKISCKASGYTFTDYSINWVKRAPGKGLKWMGWI | |
| | NTETREPAYAYDFRGRFAFSLETSASTAYLQINNLKYEDTATYFCALDYSYAMDYWGQGTS | |
| | VTVSS | |
| C11D5.3 | QIQLVQSGPELKKPGETVKISCKASGYTFTDYSINWVKRAPGKGLKWMGWINTETREPAYA | 517 |
| Full | YDFRGRFAFSLETSASTAYLQINNLKYEDTATYFCALDYSYAMDYWGQGTSVTVSSGGGGS | |
| CART | GGGGSGGGGSQIQLVQSGPELKKPGETVKISCKASGYTFTDYSINWVKRAPGKGLKWMGWI | |
| | NTETREPAYAYDFRGRFAFSLETSASTAYLQINNLKYEDTATYFCALDYSYAMDYWGQGTS | |
| | VTVSSTTTPAPRPPTPAPTIASQPLSLRPEACRPAAGGAVHTRGLDFACDIYIWAPLAGTC | |
| | GVLLLSLVITLYCKRGRKKLLYIFKQPFMRPVQTTQEEDGCSCRFPEEEEGGCELRVKFSR | |
| | SADAPAYKQGQNQLYNELNLGRREEYDVLDKRRGRDPEMGGKPRRKNPQEGLYNELQKDKM | |
| | AEAYSEIGMKGERRRGKGHDGLYQGLSTATKDTYDALHMQALPPR | |
| C12A3.2 | QIQLVQSGPELKKPGETVKISCKASGYTFRHYSMNWVKQAPGKGLKWMGRINTESGVPIYA | 518 |
| VH | DDFKGRFAFSVETSASTAYLVINNLKDEDTASYFCSNDYLYSLDFWGQGTALTVSS | |
| C12A3.2 | DIVLTQSPPSLAMSLGKRATISCRASESVTILGSHLIYWYQQKPGQPPTLLIQLASNVQTG | 519 |
| VL | VPARFSGSGSRTDFTLTIDPVEEDDVAVYYCLQSRTIPRTFGGGTKLEIK | |
| C12A3.2 | QIQLVQSGPELKKPGETVKISCKASGYTFRHYSMNWVKQAPGKGLKWMGRINTESGVPIYA | 520 |
| scFv | DDFKGRFAFSVETSASTAYLVINNLKDEDTASYFCSNDYLYSLDFWGQGTALTVSSGGGGS | |
| domain | GGGGSGGGGSDIVLTQSPPSLAMSLGKRATISCRASESVTILGSHLIYWYQQKPGQPPTLL | |
| | IQLASNVQTGVPARFSGSGSRTDFTLTIDPVEEDDVAVYYCLQSRTIPRTFGGGTKLEIK | |
| C12A3.2 | QIQLVQSGPELKKPGETVKISCKASGYTFRHYSMNWVKQAPGKGLKWMGRINTESGVPIYA | 521 |
| Full | DDFKGRFAFSVETSASTAYLVINNLKDEDTASYFCSNDYLYSLDFWGQGTALTVSSGGGGS | |
| CART | GGGGSGGGGSDIVLTQSPPSLAMSLGKRATISCRASESVTILGSHLIYWYQQKPGQPPTLL | |
| | IQLASNVQTGVPARFSGSGSRTDFTLTIDPVEEDDVAVYYCLQSRTIPRTFGGGTKLEIKT | |
| | TTPAPRPPTPAPTIASQPLSLRPEACRPAAGGAVHTRGLDFACDIYIWAPLAGTCGVLLLS | |
| | LVITLYCKRGRKKLLYIFKQPFMRPVQTTQEEDGCSCRFPEEEEGGCELRVKFSRSADAPA | |
| | YKQGQNQLYNELNLGRREEYDVLDKRRGRDPEMGGKPRRKNPQEGLYNELQKDKMAEAYSE | |
| | IGMKGERRRGKGHDGLYQGLSTATKDTYDALHMQALPPR | |
| C13F12. | QIQLVQSGPELKKPGETVKISCKASGYTFTHYSMNWVKQAPGKGLKWMGRINTETGEPLYA | 522 |
| 1 VH | DDFKGRFAFSLETSASTAYLVINNLKNEDTATFFCSNDYLYSCDYWGQGTTLTVSS | |
| C13F12. | DIVLTQSPPSLAMSLGKRATISCRASESVTILGSHLIYWYQQKPGQPPTLLIQLASNVQTG | 523 |
| 1 VL | VPARFSGSGSRTDFTLTIDPVEEDDVAVYYCLQSRTIPRTFGGGTKLEIK | |
| C13F12.1 | QIQLVQSGPELKKPGETVKISCKASGYTFTHYSMNWVKQAPGKGLKWMGRINTETGEPLYA | 524 |
| scFv | DDFKGRFAFSLETSASTAYLVINNLKNEDTATFFCSNDYLYSCDYWGQGTTLTVSSGGGGS | |
| domain | GGGGSGGGGSDIVLTQSPPSLAMSLGKRATISCRASESVTILGSHLIYWYQQKPGQPPTLL | |
| | IQLASNVQTGVPARFSGSGSRTDFTLTIDPVEEDDVAVYYCLQSRTIPRTFGGGTKLEIK | |
| C13F12.1 | QIQLVQSGPELKKPGETVKISCKASGYTFTHYSMNWVKQAPGKGLKWMGRINTETGEPLYA | 525 |
| Full | DDFKGRFAFSLETSASTAYLVINNLKNEDTATFFCSNDYLYSCDYWGQGTTLTVSSGGGGS | |
| CART | GGGGSGGGGSDIVLTQSPPSLAMSLGKRATISCRASESVTILGSHLIYWYQQKPGQPPTLL | |
| | IQLASNVQTGVPARFSGSGSRTDFTLTIDPVEEDDVAVYYCLQSRTIPRTFGGGTKLEIKT | |
| | TTPAPRPPTPAPTIASQPLSLRPEACRPAAGGAVHTRGLDFACDIYIWAPLAGTCGVLLLS | |
| | LVITLYCKRGRKKLLYIFKQPFMRPVQTTQEEDGCSCRFPEEEEGGCELRVKFSRSADAPA | |
| | YKQGQNQLYNELNLGRREEYDVLDKRRGRDPEMGGKPRRKNPQEGLYNELQKDKMAEAYSE | |
| | IGMKGERRRGKGHDGLYQGLSTATKDTYDALHMQALPPR | |

### Bispecific CARs

[0411] In an embodiment a multispecific antibody molecule is a bispecific antibody molecule. A bispecific antibody has specificity for no more than two antigens. A bispecific antibody molecule is characterized by a first immunoglobulin variable domain sequence which has binding specificity for a first epitope and a second immunoglobulin variable domain sequence that has binding specificity for a second epitope. In an embodiment the first and second epitopes are on the same antigen, e.g., the same protein (or subunit of a multimeric protein). In an embodiment the first and second epitopes overlap. In an embodiment the first and second epitopes do not overlap. In an embodiment the first and second epitopes are on different antigens, e.g., different proteins (or different subunits of a multimeric protein). In an embodiment a bispecific antibody molecule comprises a heavy chain variable domain sequence and a light chain variable domain sequence which have binding specificity for a first epitope and a heavy chain variable domain sequence and a light chain variable domain sequence which have binding specificity for a second epitope. In an embodiment a bispecific antibody molecule comprises a half antibody having binding specificity for a first epitope and a half antibody having binding specificity for a second epitope. In an embodiment a bispecific antibody molecule comprises a half antibody, or fragment thereof, having binding specificity for a first epitope and a half antibody, or fragment thereof, having binding specificity for a second epitope. In an embodiment a bispecific antibody molecule comprises a scFv, or fragment thereof, have binding specificity for a first epitope and a scFv, or fragment thereof, have binding specificity for a second epitope.

[0412] In certain embodiments, the antibody molecule is a multi-specific (e.g., a bispecific or a trispecific) antibody molecule. Protocols for generating bispecific or heterodimeric antibody molecules are known in the art; including but not limited to, for example, the “knob in a hole” approach described in, e.g., US 5731168; the electrostatic steering Fc pairing as described in, e.g., WO 09/089004, WO 06/106905 and WO 2010/129304; Strand Exchange Engineered Domains (SEED) heterodimer formation as described in, e.g., WO 07/110205; Fab arm exchange as described in, e.g., WO 08/119353, WO 2011/131746, and WO 2013/060867; double antibody conjugate, e.g., by antibody cross-linking to generate a bi-specific structure using a heterobifunctional reagent having an amine-reactive group and a sulfhydryl reactive group as described in, e.g., U.S. Pat. No. 4,433,059; bispecific antibody determinants generated by recombining half antibodies (heavy-light chain pairs or Fabs) from different antibodies through cycle of reduction and oxidation of disulfide bonds between the two heavy chains, as described in, e.g., U.S. Pat. No. 4,444,878; trifunctional antibodies, e.g., three Fab′ fragments cross-linked through sulfhdryl reactive groups, as described in, e.g., U.S. Pat. No. 5,273,743; biosynthetic binding proteins, e.g., pair of scFvs cross-linked through C-terminal tails preferably through disulfide or amine-reactive chemical cross-linking, as described in, e.g., U.S. Pat. No. 5,534,254; bifunctional antibodies, e.g., Fab fragments with different binding specificities dimerized through leucine zippers (e.g., c-fos and c-jun) that have replaced the constant domain, as described in, e.g., U.S. Pat. No. 5,582,996; bispecific and oligospecific mono-and oligovalent receptors, e.g., VH-CH1 regions of two antibodies (two Fab fragments) linked through a polypeptide spacer between the CH1 region of one antibody and the VH region of the other antibody typically with associated light chains, as described in, e.g., U.S. Pat. No. 5,591,828; bispecific DNA-antibody conjugates, e.g., crosslinking of antibodies or Fab fragments through a double stranded piece of DNA, as described in, e.g., U.S. Pat. No. 5,635,602; bispecific fusion proteins, e.g., an expression construct containing two scFvs with a hydrophilic helical peptide linker between them and a full constant region, as described in, e.g., U.S. Pat. No. 5,637,481; multivalent and multispecific binding proteins, e.g., dimer of polypeptides having first domain with binding region of Ig heavy chain variable region, and second domain with binding region of Ig light chain variable region, generally termed diabodies (higher order structures are also encompassed creating for bispecifc, trispecific, or tetraspecific molecules, as described in, e.g., U.S. Pat. No. 5,837,242; minibody constructs with linked VL and VH chains further connected with peptide spacers to an antibody hinge region and CH3 region, which can be dimerized to form bispecific/multivalent molecules, as described in, e.g., U.S. Pat. No. 5,837,821; VH and VL domains linked with a short peptide linker (e.g., 5 or 10 amino acids) or no linker at all in either orientation, which can form dimers to form bispecific diabodies; trimers and tetramers, as described in, e.g., U.S. Pat. No. 5,844,094; String of VH domains (or VL domains in family members) connected by peptide linkages with crosslinkable groups at the C-terminus futher associated with VL domains to form a series of FVs (or scFvs), as described in, e.g., U.S. Pat. No. 5,864,019; and single chain binding polypeptides with both a VH and a VL domain linked through a peptide linker are combined into multivalent structures through non-covalent or chemical crosslinking to form, e.g., homobivalent, heterobivalent, trivalent, and tetravalent structures using both scFV or diabody type format, as described in, e.g., U.S. Pat. No. 5,869,620. Additional exemplary multispecific and bispecific molecules and methods of making the same are found, for example, in U.S. Pat. No. 5,910,573, U.S. Pat. No. 5,932,448, U.S. Pat. No. 5,959,083, U.S. Pat. No. 5,989,830, U.S. Pat. No. 6,005,079, U.S. Pat. No. 6,239,259, U.S. Pat. No. 6,294,353, U.S. Pat. No. 6,333,396, U.S. Pat. No. 6,476,198, U.S. Pat. No. 6,511,663, U.S. Pat. No. 6,670,453, U.S. Pat. No. 6,743,896, U.S. Pat. No. 6,809,185, U.S. Pat. No. 6,833,441, U.S. Pat. No. 7,129,330, U.S. Pat. No. 7,183,076, U.S. Pat. No. 7,521,056, U.S. Pat. No. 7,527,787, U.S. Pat. No. 7,534,866, U.S. Pat. No. 7,612,181, US2002004587A1, US2002076406A1, US2002103345A1, US2003207346A1, US2003211078A1, US2004219643A1, US2004220388A1, US2004242847A1, US2005003403A1, US2005004352A1, US2005069552A1, US2005079170A1, US2005100543A1, US2005136049A1, US2005136051A1, US2005163782A1, US2005266425A1, US2006083747A1, US2006120960A1, US2006204493A1, US2006263367A1, US2007004909A1, US2007087381A1, US2007128150A1, US2007141049A1, US2007154901A1, US2007274985A1, US2008050370A1, US2008069820A1, US2008152645A1, US2008171855A1, US2008241884A1, US2008254512A1, US2008260738A1, US2009130106A1, US2009148905A1, US2009155275A1, US2009162359A1, US2009162360A1, US2009175851A1, US2009175867A1, US2009232811A1, US2009234105A1, US2009263392A1, US2009274649A1, EP346087A2, WO0006605A2, WO02072635A2, WO04081051A1, WO06020258A2, WO2007044887A2, WO2007095338A2, WO2007137760A2, WO2008119353A1, WO2009021754A2, WO2009068630A1, WO9103493A1, WO9323537A1, WO9409131A1, WO9412625A2, WO9509917A1, WO9637621A2, WO9964460A1. The contents of the above-referenced applications are incorporated herein by reference in their entireties.

[0413] Within each antibody or antibody fragment (e.g., scFv) of a bispecific antibody molecule, the VH can be upstream or downstream of the VL. In some embodiments, the upstream antibody or antibody fragment (e.g., scFv) is arranged with its VH (VH₁) upstream of its VL (VL₁) and the downstream antibody or antibody fragment (e.g., scFv) is arranged with its VL (VL₂) upstream of its VH (VH₂), such that the overall bispecific antibody molecule has the arrangement VH₁-VL₁-VL₂-VH₂. In other embodiments, the upstream antibody or antibody fragment (e.g., scFv) is arranged with its VL (VL₁) upstream of its VH (VH₁) and the downstream antibody or antibody fragment (e.g., scFv) is arranged with its VH (VH₂) upstream of its VL (VL₂), such that the overall bispecific antibody molecule has the arrangement VL₁-VH₁-VH₂-VL₂. Optionally, a linker is disposed between the two antibodies or antibody fragments (e.g., scFvs), e.g., between VL₁ and VL₂ if the construct is arranged as VH₁-VL₁-VL₂-VH₂, or between VH₁ and VH₂ if the construct is arranged as VL₁-VH₁-VH₂-VL₂. The linker may be a linker as described herein, e.g., a (Gly₄-Ser)n linker, wherein n is 1, 2, 3, 4, 5, or 6, preferably 4 (SEQ ID NO: 26). In general, the linker between the two scFvs should be long enough to avoid mispairing between the domains of the two scFvs. Optionally, a linker is disposed between the VL and VH of the first scFv. Optionally, a linker is disposed between the VL and VH of the second scFv. In constructs that have multiple linkers, any two or more of the linkers can be the same or different. Accordingly, in some embodiments, a bispecific CAR comprises VLs, VHs, and optionally one or more linkers in an arrangement as described herein.

[0414] In certain embodiments the antibody molecule is a bispecific antibody molecule having a first binding specificity for a first B-cell epitope and a second binding specificity for another B-cell antigen. For instance, in some embodiments the bispecific antibody molecule has a first binding specificity for CD19 and a second binding specificity for one or more of CD10, CD20, CD22, CD34, CD123, FLT-3, ROR1, CD79b, CD179b, or CD79a. In some embodiments the bispecific antibody molecule has a first binding specificity for CD19 and a second binding specificity for CD22.

### Chimeric TCR

[0415] In one aspect, the CD19 antibodies and antibody fragments of the present invention (for example, those disclosed in Tables 2 or 3) can be grafted to one or more constant domain of a T cell receptor (“TCR”) chain, for example, a TCR alpha or TCR beta chain, to create an chimeric TCR that binds specificity to CD19. Without being bound by theory, it is believed that chimeric TCRs will signal through the TCR complex upon antigen binding. For example, a CD19 scFv as disclosed herein, can be grafted to the constant domain, e.g., at least a portion of the extracellular constant domain, the transmembrane domain and the cytoplasmic domain, of a TCR chain, for example, the TCR alpha chain and/or the TCR beta chain. As another example, a CD19 antibody fragment, for example a VL domain as described herein, can be grafted to the constant domain of a TCR alpha chain, and a CD19 antibody fragment, for example a VH domain as described herein, can be grafted to the constant domain of a TCR beta chain (or alternatively, a VL domain may be grafted to the constant domain of the TCR beta chain and a VH domain may be grafted to a TCR alpha chain). As another example, the CDRs of a CD19 antibody or antibody fragment, e.g., the CDRs of a CD19 antibody or antibody fragment as described in Tables 4 or 5 may be grafted into a TCR alpha and/or beta chain to create a chimeric TCR that binds specifically to CD19. For example, the LCDRs disclosed herein may be grafted into the variable domain of a TCR alpha chain and the HCDRs disclosed herein may be grafted to the variable domain of a TCR beta chain, or vice versa. Such chimeric TCRs may be produced by methods known in the art (For example, Willemsen R A et al, Gene Therapy 2000; 7: 1369-1377; Zhang T et al, Cancer Gene Ther 2004; 11: 487-496; Aggen et al, Gene Ther. 2012 April; 19(4):365-74).

### Transmembrane Domain

[0416] With respect to the transmembrane domain, in various embodiments, a CAR can be designed to comprise a transmembrane domain that is attached to the extracellular domain of the CAR. A transmembrane domain can include one or more additional amino acids adjacent to the transmembrane region, e.g., one or more amino acid associated with the extracellular region of the protein from which the transmembrane was derived (e.g., 1, 2, 3, 4, 5, 6, 7, 8, 9, 10 up to 15 amino acids of the extracellular region) and/or one or more additional amino acids associated with the intracellular region of the protein from which the transmembrane protein is derived (e.g., 1, 2, 3, 4, 5, 6, 7, 8, 9, 10 up to 15 amino acids of the intracellular region). In one aspect, the transmembrane domain is one that is associated with one of the other domains of the CAR is used, e.g., in one embodiment, the transmembrane domain may be from the same protein that the signaling domain, costimulatory domain or the hinge domain is derived from. In another aspect, the transmembrane domain is not derived from the same protein that any other domain of the CAR is derived from. In some instances, the transmembrane domain can be selected or modified by amino acid substitution to avoid binding of such domains to the transmembrane domains of the same or different surface membrane proteins, e.g., to minimize interactions with other members of the receptor complex. In one aspect, the transmembrane domain is capable of homodimerization with another CAR on the cell surface of a CAR-expressing cell. In a different aspect, the amino acid sequence of the transmembrane domain may be modified or substituted so as to minimize interactions with the binding domains of the native binding partner present in the same CAR-expressing cell.

[0417] The transmembrane domain may be derived either from a natural or from a recombinant source. Where the source is natural, the domain may be derived from any membrane-bound or transmembrane protein. In one aspect, the transmembrane domain is capable of signaling to the intracellular domain(s) whenever the CAR has bound to a target. A transmembrane domain of particular use in this invention may include at least the transmembrane domain(s) of, e.g., the alpha, beta or zeta chain of the T-cell receptor, CD28, CD3 epsilon, CD45, CD4, CDS, CD8 (e.g., CD8 alpha, CD8 beta), CD9, CD16, CD22, CD33, CD37, CD64, CD80, CD86, CD134, CD137, CD154. In some embodiments, a transmembrane domain may include at least the transmembrane region(s) of, e.g., KIRDS2, OX40, CD2, CD27, LFA-1 (CD11a, CD18), ICOS (CD278), 4-1BB (CD137), GITR, CD40, BAFFR, HVEM (LIGHTR), SLAMF7, NKp80 (KLRF1), NKp44, NKp30, NKp46, CD160, CD19, IL2R beta, IL2R gamma, IL7R α, ITGA1, VLA1, CD49a, ITGA4, IA4, CD49D, ITGA6, VLA-6, CD49f, ITGAD, CD11d, ITGAE, CD103, ITGAL, CD11a, LFA-1, ITGAM, CD11b, ITGAX, CD11c, ITGB1, CD29, ITGB2, CD18, LFA-1, ITGB7, TNFR2, DNAM1 (CD226), SLAMF4 (CD244, 2B4), CD84, CD96 (Tactile), CEACAM1, CRTAM, Ly9 (CD229), CD160 (BY55), PSGL1, CD100 (SEMA4D), SLAMF6 (NTB-A, Ly108), SLAM (SLAMF1, CD150, IPO-3), BLAME (SLAMF8), SELPLG (CD162), LTBR, PAG/Cbp, NKG2D, and NKG2C.

[0418] In some instances, the transmembrane domain can be attached to the extracellular region of the CAR, e.g., the antigen binding domain of the CAR, via a hinge, e.g., a hinge from a human protein. For example, in one embodiment, the hinge can be a human Ig (immunoglobulin) hinge (e.g., an IgG4 hinge, an IgD hinge), a GS linker (e.g., a GS linker described herein), a KIR2DS2 hinge or a CD8a hinge. In one embodiment, the hinge or spacer comprises (e.g., consists of) the amino acid sequence of SEQ ID NO: 2. In one aspect, the transmembrane domain comprises (e.g., consists of) a transmembrane domain of SEQ ID NO: 6.

[0419] In one aspect, the hinge or spacer comprises an IgG4 hinge. For example, in one embodiment, the hinge or spacer comprises a hinge of the amino acid sequence SEQ ID NO: 3.

[0420] In some embodiments, the hinge or spacer comprises a hinge encoded by a nucleotide sequence SEQ ID NO: 14.

[0421] In one aspect, the hinge or spacer comprises an IgD hinge. For example, in one embodiment, the hinge or spacer comprises a hinge of the amino acid sequence SEQ ID NO: 4.

[0422] In some embodiments, the hinge or spacer comprises a hinge encoded by a nucleotide sequence of SEQ ID NO: 15.

[0423] In one aspect, the transmembrane domain may be recombinant, in which case it will comprise predominantly hydrophobic residues such as leucine and valine. In one aspect a triplet of phenylalanine, tryptophan and valine can be found at each end of a recombinant transmembrane domain.

[0424] Optionally, a short oligo- or polypeptide linker, between 2 and 10 amino acids in length may form the linkage between the transmembrane domain and the cytoplasmic signaling region of the CAR. A glycine-serine doublet provides a particularly suitable linker. For example, in one aspect, the linker comprises the amino acid sequence of GGGGSGGGGS (SEQ ID NO: 5). In some embodiments, the linker is encoded by a nucleotide sequence of GGTGGCGGAGGTTCTGGAGGTGGAGGTTCC (SEQ ID NO: 16).

[0425] In one aspect, the hinge or spacer comprises a KIR2DS2 hinge and portions thereof.

### Cytoplasmic Domain

[0426] The cytoplasmic domain or region of the CAR includes an intracellular signaling domain. An intracellular signaling domain is generally responsible for activation of at least one of the normal effector functions of the immune cell in which the CAR has been introducede. The term “effector function” refers to a specialized function of a cell. Effector function of a T cell, for example, may be cytolytic activity or helper activity including the secretion of cytokines. Thus the term “intracellular signaling domain” refers to the portion of a protein which transduces the effector function signal and directs the cell to perform a specialized function. While usually the entire intracellular signaling domain can be employed, in many cases it is not necessary to use the entire chain. To the extent that a truncated portion of the intracellular signaling domain is used, such truncated portion may be used in place of the intact chain as long as it transduces the effector function signal. The term intracellular signaling domain is thus meant to include any truncated portion of the intracellular signaling domain sufficient to transduce the effector function signal.

[0427] Examples of intracellular signaling domains for use in the CAR of the invention include the cytoplasmic sequences of the T cell receptor (TCR) and co-receptors that act in concert to initiate signal transduction following antigen receptor engagement, as well as any derivative or variant of these sequences and any recombinant sequence that has the same functional capability.

[0428] It is known that signals generated through the TCR alone are insufficient for full activation of the T cell and that a secondary and/or costimulatory signal is also required. Thus, T cell activation can be said to be mediated by two distinct classes of cytoplasmic signaling sequences: those that initiate antigen-dependent primary activation through the TCR (primary intracellular signaling domains) and those that act in an antigen-independent manner to provide a secondary or costimulatory signal (secondary cytoplasmic domain, e.g., a costimulatory domain).

[0429] A primary cytoplasmic signaling domain regulates primary activation of the TCR complex either in a stimulatory way, or in an inhibitory way. Primary intracellular signaling domains that act in a stimulatory manner may contain signaling motifs which are known as immunoreceptor tyrosine-based activation motifs or ITAMs.

[0430] Examples of ITAM containing primary intracellular signaling domains that are of particular use in the invention include those of CD3 zeta, common FcR gamma (FCER1G), Fc gamma RIIa, FcR beta (Fc Epsilon R1b), CD3 gamma, CD3 delta, CD3 epsilon, CDS, CD22, CD79a, CD79b, CD278 (also known as “ICOS”), FcεRI, CD66d, DAP10, and DAP12. In one embodiment, a CAR of the invention comprises an intracellular signaling domain, e.g., a primary signaling domain of CD3-zeta, e.g., a CD3-zeta sequence described herein.

[0431] In one embodiment, a primary signaling domain comprises a modified ITAM domain, e.g., a mutated ITAM domain which has altered (e.g., increased or decreased) activity as compared to the native ITAM domain. In one embodiment, a primary signaling domain comprises a modified ITAM-containing primary intracellular signaling domain, e.g., an optimized and/or truncated ITAM-containing primary intracellular signaling domain. In an embodiment, a primary signaling domain comprises one, two, three, four or more ITAM motifs.

[0432] Further examples of molecules containing a primary intracellular signaling domain that are of particular use in the invention include those of DAP10, DAP12, and CD32.

[0433] The intracellular domain of the CAR can comprise the CD3-zeta signaling domain by itself or it can be combined with any other desired intracellular signaling domain(s) useful in the context of a CAR of the invention. For example, the intracellular signaling domain of the CAR can comprise a CD3 zeta chain portion and a costimulatory signaling domain. The costimulatory signaling domain refers to a portion of the CAR comprising the intracellular domain of a costimulatory molecule. A costimulatory molecule is a cell surface molecule other than an antigen receptor or its ligands that is required for an efficient response of lymphocytes to an antigen. Examples of such molecules include CD27, CD28, 4-1BB (CD137), OX40, CD30, CD40, PD-1 (also known as PD1), ICOS, lymphocyte function-associated antigen-1 (LFA-1), CD2, CD7, LIGHT, NKG2C, B7-H3, and a ligand that specifically binds with CD83, and the like. For example, CD27 costimulation has been demonstrated to enhance expansion, effector function, and survival of human CART cells in vitro and augments human T cell persistence and antitumor activity in vivo (Song et al. Blood. 2012; 119(3):696-706). Further examples of such costimulatory molecules include an MHC class I molecule, a TNF receptor protein, an Immunoglobulin-like protein, a cytokine receptor, an integrin, a signaling lymphocytic activation molecule (SLAM protein), an activating NK cell receptor, BTLA, a Toll ligand receptor, OX40, CD2, CD7, CD27, CD28, CD30, CD40, CDS, ICAM-1, LFA-1 (CD11a/CD18), 4-1BB (CD137), B7-H3, CDS, ICAM-1, ICOS (CD278), GITR, BAFFR, LIGHT, HVEM (LIGHTR), KIRDS2, SLAMF7, NKp80 (KLRF1), NKp44, NKp30, NKp46, CD19, CD4, CD8alpha, CD8beta, IL2R beta, IL2R gamma, IL7R alpha, ITGA4, VLA1, CD49a, ITGA4, IA4, CD49D, ITGA6, VLA-6, CD49f, ITGAD, CD11d, ITGAE, CD103, ITGAL, CD11a, LFA-1, ITGAM, CD11b, ITGAX, CD11c, ITGB1, CD29, ITGB2, CD18, LFA-1, ITGB7, NKG2D, NKG2C, TNFR2, TRANCE/RANKL, DNAM1 (CD226), SLAMF4 (CD244, 2B4), CD84, CD96 (Tactile), CEACAM1, CRTAM, Ly9 (CD229), CD160 (BY55), PSGL1, CD100 (SEMA4D), CD69, SLAMF6 (NTB-A, Ly108), SLAM (SLAMF1, CD150, IPO-3), BLAME (SLAMF8), SELPLG (CD162), LTBR, LAT, GADS, SLP-76, PAG/Cbp, CD19a, and a ligand that specifically binds with CD83. For example, CD27 costimulation has been demonstrated to enhance expansion, effector function, and survival of human CART cells in vitro and augments human T cell persistence and antitumor activity in vivo (Song et al. Blood. 2012; 119(3):696-706).

[0434] The intracellular signaling domains within the cytoplasmic portion of the CAR of the invention may be linked to each other in a random or specified order. Optionally, a short oligo- or polypeptide linker, for example, between 2 and 10 amino acids (e.g., 2, 3, 4, 5, 6, 7, 8, 9, or 10 amino acids) in length may form the linkage between intracellular signaling domains. In one embodiment, a glycine-serine doublet can be used as a suitable linker. In one embodiment, a single amino acid, e.g., an alanine, a glycine, can be used as a suitable linker.

[0435] In one aspect, the intracellular signaling domain is designed to comprise two or more, e.g., 2, 3, 4, 5, or more, costimulatory signaling domains. In an embodiment, the two or more, e.g., 2, 3, 4, 5, or more, costimulatory signaling domains, are separated by a linker molecule, e.g., a linker molecule described herein. In one embodiment, the intracellular signaling domain comprises two costimulatory signaling domains. In some embodiments, the linker molecule is a glycine residue. In some embodiments, the linker is an alanine residue.

[0436] In one aspect, the intracellular signaling domain is designed to comprise the signaling domain of CD3-zeta and the signaling domain of CD28. In one aspect, the intracellular signaling domain is designed to comprise the signaling domain of CD3-zeta and the signaling domain of 4-1BB. In one aspect, the signaling domain of 4-1BB is a signaling domain of SEQ ID NO: 7. In one aspect, the signaling domain of CD3-zeta is a signaling domain of SEQ ID NO: 9 (mutant CD3-zeta) or SEQ ID NO: 10 (wild type human CD3-zeta).

[0437] In one aspect, the intracellular is designed to comprise the signaling domain of CD3-zeta and the signaling domain of 4-1BB. In one aspect, the signaling domain of 4-1BB comprises an amino acid sequence of SEQ ID NO: 7. In one aspect, the signaling domain of 4-1BB is encoded by a nucleic acid sequence of SEQ ID NO: 18.

[0438] In one aspect, the intracellular signaling domain is designed to comprise the signaling domain of CD3-zeta and the signaling domain of CD27. In one aspect, the signaling domain of CD27 comprises an amino acid sequence of SEQ ID NO: 8. In one aspect, the signalling domain of CD27 is encoded by a nucleic acid sequence of SEQ ID NO: 19.

[0439] In one aspect, the intracellular signaling domain is designed to comprise the signaling domain of CD3-zeta and the signaling domain of CD28. In one aspect, the signaling domain of CD28 comprises an amino acid sequence of SEQ ID NO: 36. In one aspect, the signaling domain of CD28 is encoded by a nucleic acid sequence of SEQ ID NO: 37.

[0440] In one aspect, the intracellular signaling domain is designed to comprise the signaling domain of CD3-zeta and the signaling domain of ICOS. In one aspect, the signaling domain of ICOS comprises an amino acid sequence of SEQ ID NO: 38 or 43. In one aspect, the signaling domain of ICOS is encoded by a nucleic acid sequence of SEQ ID NO: 44.

### Natural Killer Cell Receptor (NKR) CARs

[0441] In an embodiment, the CAR molecule described herein comprises one or more components of a natural killer cell receptor (NKR), thereby forming an NKR-CAR. The NKR component can be a transmembrane domain, a hinge domain, or a cytoplasmic domain from any of the following natural killer cell receptors: killer cell immunoglobulin-like receptor (KIR), e.g., KIR2DL1, KIR2DL2/L3, KIR2DL4, KIR2DL5A, KIR2DL5B, KIR2DS1, KIR2DS2, KIR2DS3, KIR2DS4, DIR2DS5, KIR3DL1/S1, KIR3DL2, KIR3DL3, KIR2DP1, and KIR3DP1; natural cyotoxicity receptor (NCR), e.g., NKp30, NKp44, NKp46; signaling lymphocyte activation molecule (SLAM) family of immune cell receptors, e.g., CD48, CD229, 2B4, CD84, NTB-A, CRACC, BLAME, and CD2F-10; Fc receptor (FcR), e.g., CD16, and CD64; and Ly49 receptors, e.g., LY49A, LY49C. The NKR-CAR molecules described herein may interact with an adaptor molecule or intracellular signaling domain, e.g., DAP12. Exemplary configurations and sequences of CAR molecules comprising NKR components are described in International Publication No. WO2014/145252, the contents of which are hereby incorporated by reference.

### Split CAR

[0442] In some embodiments, the CAR-expressing cell described herein, uses a split CAR. The split CAR approach is described in more detail in publications WO2014/055442 and WO2014/055657, incorporated herein by reference. Briefly, a split CAR system comprises a cell expressing a first CAR having a first antigen binding domain and a costimulatory domain (e.g., 4-1BB), and the cell also expresses a second CAR having a second antigen binding domain and an intracellular signaling domain (e.g., CD3 zeta). When the cell encounters the first antigen, the costimulatory domain is activated, and the cell proliferates. When the cell encounters the second antigen, the intracellular signaling domain is activated and cell-killing activity begins. Thus, the CAR-expressing cell is only fully activated in the presence of both antigens. In embodiments the first antigen binding domain recognizes the tumor antigen or B cell antigen described herein, e.g., comprises an antigen binding domain described herein, and the second antigen binding domain recognizes a second antigen, e.g., a second tumor antigen or a second B cell antigen described herein.

Co-Expression of CAR with Other Molecules or Agents

### Co-Expression of a Second CAR

[0443] In one aspect, the CAR-expressing cell described herein can further comprise a second CAR, e.g., a second CAR that includes a different antigen binding domain, e.g., to the same target (CD19) or a different target (e.g., a target other than CD19, e.g., a B cell antigen other than CD19, e.g., CD10, CD20, CD22, CD34, CD123, FLT-3, ROR1, CD79b, CD179b, or CD79a). In one embodiment, the CAR-expressing cell comprises a first CAR that targets a first antigen and includes an intracellular signaling domain having a costimulatory signaling domain but not a primary signaling domain, and a second CAR that targets a second, different, antigen and includes an intracellular signaling domain having a primary signaling domain but not a costimulatory signaling domain. Placement of a costimulatory signaling domain, e.g., 4-1BB, CD28, CD27, OX-40 or ICOS, onto the first CAR, and the primary signaling domain, e.g., CD3 zeta, on the second CAR can limit the CAR activity to cells where both targets are expressed. In one embodiment, the CAR expressing cell comprises a first CD19 CAR that includes a CD19 binding domain, a transmembrane domain and a costimulatory domain and a second CAR that targets an antigen other than CD19 (e.g., a target other than CD19, e.g., a B cell antigen other than CD19, e.g., CD10, CD20, CD22, CD34, CD123, FLT-3, ROR1, CD79b, CD179b, or CD79a) and includes an antigen binding domain, a transmembrane domain and a primary signaling domain. In another embodiment, the CAR expressing cell comprises a first CD19 CAR that includes a CD19 binding domain, a transmembrane domain and a primary signaling domain and a second CAR that targets an antigen other than CD19 (e.g., a target other than CD19, e.g., a B cell antigen other than CD19, e.g., CD10, CD20, CD22, CD34, CD123, FLT-3, ROR1, CD79b, CD179b, or CD79a) and includes an antigen binding domain to the antigen, a transmembrane domain and a costimulatory signaling domain.

[0444] In one embodiment, the CAR-expressing cell comprises a CD19 CAR described herein and an inhibitory CAR. In one embodiment, the inhibitory CAR comprises an antigen binding domain that binds an antigen found on normal cells but not cancer cells, e.g., normal cells that also express CD19. In one embodiment, the inhibitory CAR comprises the antigen binding domain, a transmembrane domain and an intracellular domain of an inhibitory molecule. For example, the intracellular domain of the inhibitory CAR can be an intracellular domain of PD1, PD-L1, CTLA4, TIM3, LAGS, VISTA, BTLA, TIGIT, LAIR1, CD160, 2B4, CD80, CD86, B7-H3 (CD276), B7-H4 (VTCN1), HVEM (TNFRSF14 or CD270), KIR, A2aR, MHC class I, MHC class II, GALS, adenosine, or TGF beta.

[0445] In one embodiment, when the CAR-expressing cell comprises two or more different CARs, the antigen binding domains of the different CARs can be such that the antigen binding domains do not interact with one another. For example, a cell expressing a first and second CAR can have an antigen binding domain of the first CAR, e.g., as a fragment, e.g., an scFv, that does not form an association with the antigen binding domain of the second CAR, e.g., the antigen binding domain of the second CAR is a VHH.

[0446] In some embodiments, the antigen binding domain comprises a single domain antigen binding (SDAB) molecules include molecules whose complementary determining regions are part of a single domain polypeptide. Examples include, but are not limited to, heavy chain variable domains, binding molecules naturally devoid of light chains, single domains derived from conventional 4-chain antibodies, engineered domains and single domain scaffolds other than those derived from antibodies. SDAB molecules may be any of the art, or any future single domain molecules. SDAB molecules may be derived from any species including, but not limited to mouse, human, camel, llama, lamprey, fish, shark, goat, rabbit, and bovine. This term also includes naturally occurring single domain antibody molecules from species other than Camelidae and sharks.

[0447] In one aspect, an SDAB molecule can be derived from a variable region of the immunoglobulin found in fish, such as, for example, that which is derived from the immunoglobulin isotype known as Novel Antigen Receptor (NAR) found in the serum of shark. Methods of producing single domain molecules derived from a variable region of NAR (“IgNARs”) are described in WO 03/014161 and Streltsov (2005) Protein Sci. 14:2901-2909.

[0448] According to another aspect, an SDAB molecule is a naturally occurring single domain antigen binding molecule known as heavy chain devoid of light chains. Such single domain molecules are disclosed in WO 9404678 and Hamers-Casterman, C. et al. (1993) Nature 363:446-448, for example. For clarity reasons, this variable domain derived from a heavy chain molecule naturally devoid of light chain is known herein as a VHH or nanobody to distinguish it from the conventional VH of four chain immunoglobulins. Such a VHH molecule can be derived from Camelidae species, for example in camel, llama, dromedary, alpaca and guanaco. Other species besides Camelidae may produce heavy chain molecules naturally devoid of light chain; such VHHs are within the scope of the invention.

[0449] The SDAB molecules can be recombinant, CDR-grafted, humanized, camelized, de-immunized and/or in vitro generated (e.g., selected by phage display).

[0450] It has also been discovered, that cells having a plurality of chimeric membrane embedded receptors comprising an antigen binding domain that interactions between the antigen binding domain of the receptors can be undesirable, e.g., because it inhibits the ability of one or more of the antigen binding domains to bind its cognate antigen. Accordingly, disclosed herein are cells having a first and a second non-naturally occurring chimeric membrane embedded receptor comprising antigen binding domains that minimize such interactions. Also disclosed herein are nucleic acids encoding a first and a second non-naturally occurring chimeric membrane embedded receptor comprising an antigen binding domains that minimize such interactions, as well as methods of making and using such cells and nucleic acids. In an embodiment the antigen binding domain of one of the first and the second non-naturally occurring chimeric membrane embedded receptor, comprises an scFv, and the other comprises a single VH domain, e.g., a camelid, shark, or lamprey single VH domain, or a single VH domain derived from a human or mouse sequence.

[0451] In some embodiments, the claimed invention comprises a first and second CAR, wherein the antigen binding domain of one of the first and the second CAR does not comprise a variable light domain and a variable heavy domain. In some embodiments, the antigen binding domain of one of the first and the second CAR is an scFv, and the other is not an scFv. In some embodiments, the antigen binding domain of one of the first and the second CAR comprises a single VH domain, e.g., a camelid, shark, or lamprey single VH domain, or a single VH domain derived from a human or mouse sequence. In some embodiments, the antigen binding domain of one of the first and the second CAR comprises a nanobody. In some embodiments, the antigen binding domain of one of the first and the second CAR comprises a camelid VHH domain.

[0452] In some embodiments, the antigen binding domain of one of the first and the second CAR comprises an scFv, and the other comprises a single VH domain, e.g., a camelid, shark, or lamprey single VH domain, or a single VH domain derived from a human or mouse sequence. In some embodiments, the antigen binding domain of one of the first and the second CAR comprises an scFv, and the other comprises a nanobody. In some embodiments, the antigen binding domain of one of the first and the second CAR comprises comprises an scFv, and the other comprises a camelid VHH domain.

[0453] In some embodiments, when present on the surface of a cell, binding of the antigen binding domain of the first CAR to its cognate antigen is not substantially reduced by the presence of the second CAR. In some embodiments, binding of the antigen binding domain of the first CAR to its cognate antigen in the presence of the second CAR is 85%, 90%, 95%, 96%, 97%, 98% or 99% of binding of the antigen binding domain of the first CAR to its cognate antigen in the absence of the second CAR.

[0454] In some embodiments, when present on the surface of a cell, the antigen binding domains of the first and the second CAR, associate with one another less than if both were scFv antigen binding domains. In some embodiments, the antigen binding domains of the first and the second CAR, associate with one another 85%, 90%, 95%, 96%, 97%, 98% or 99% less than if both were scFv antigen binding domains.

Co-Expression of an Agent that Enhances CAR Activity

[0455] In another aspect, the CAR-expressing cell described herein can further express another agent, e.g., an agent that enhances the activity or fitness of a CAR-expressing cell.

[0456] For example, in one embodiment, the agent can be an agent which inhibits a molecule that modulates or regulates, e.g., inhibits, T cell function. In some embodiments, the molecule that modulates or regulates T cell function is an inhibitory molecule. Inhibitory molecules, e.g., PD-1, can, in some embodiments, decrease the ability of a CAR-expressing cell to mount an immune effector response. Examples of inhibitory molecules include PD-1, PD-L1, CTLA4, TIM3, LAG3, VISTA, BTLA, TIGIT, LAIR1, CD160, 2B4, CD80, CD86, B7-H3 (CD276), B7-H4 (VTCN1), HVEM (TNFRSF14 or CD270), KIR, A2aR, MHC class I, MHC class II, GAL9, adenosine, or TGF beta.

[0457] In embodiments, an agent, e.g., an inhibitory nucleic acid, e.g., a dsRNA, e.g., an siRNA or shRNA; or e.g., an inhibitory protein or system, e.g., a clustered regularly interspaced short palindromic repeats (CRISPR), a transcription-activator like effector nuclease (TALEN), or a zinc finger endonuclease (ZFN), e.g., as described herein, can be used to inhibit expression of a molecule that modulates or regulates, e.g., inhibits, T-cell function in the CAR-expressing cell. In an embodiment the agent is an shRNA, e.g., an shRNA described herein. In an embodiment, the agent that modulates or regulates, e.g., inhibits, T-cell function is inhibited within a CAR-expressing cell. For example, a dsRNA molecule that inhibits expression of a molecule that modulates or regulates, e.g., inhibits, T-cell function is linked to the nucleic acid that encodes a component, e.g., all of the components, of the CAR.

[0458] In one embodiment, the agent that inhibits an inhibitory molecule comprises a first polypeptide, e.g., an inhibitory molecule, associated with a second polypeptide that provides a positive signal to the cell, e.g., an intracellular signaling domain described herein. In one embodiment, the agent comprises a first polypeptide, e.g., of an inhibitory molecule such as PD-1, PD-L1, CTLA4, TIM3, LAG3, VISTA, BTLA, TIGIT, LAIR1, CD160, 2B4, CD80, CD86, B7-H3 (CD276), B7-H4 (VTCN1), HVEM (TNFRSF14 or CD270), KIR, A2aR, MHC class I, MHC class II, GAL9, adenosine, or TGF beta, or a fragment of any of these (e.g., at least a portion of an extracellular domain of any of these), and a second polypeptide which is an intracellular signaling domain described herein (e.g., comprising a costimulatory domain (e.g., 4-1BB, CD27 or CD28, e.g., as described herein) and/or a primary signaling domain (e.g., a CD3 zeta signaling domain described herein). In one embodiment, the agent comprises a first polypeptide of PD-1 or a fragment thereof (e.g., at least a portion of an extracellular domain of PD-1), and a second polypeptide of an intracellular signaling domain described herein (e.g., a CD28 signaling domain described herein and/or a CD3 zeta signaling domain described herein). PD-1 is an inhibitory member of the CD28 family of receptors that also includes CD28, CTLA-4, ICOS, and BTLA. PD-1 is expressed on activated B cells, T cells and myeloid cells (Agata et al. 1996 Int. Immunol 8:765-75). Two ligands for PD-1, PD-L1 and PD-L2 have been shown to downregulate T cell activation upon binding to PD-1 (Freeman et a. 2000 J Exp Med 192:1027-34; Latchman et al. 2001 Nat Immunol 2:261-8; Carter et al. 2002 Eur J Immunol 32:634-43). PD-L1 is abundant in human cancers (Dong et al. 2003 J Mol Med 81:281-7; Blank et al. 2005 Cancer Immunol. Immunother 54:307-314; Konishi et al. 2004 Clin Cancer Res 10:5094). Immune suppression can be reversed by inhibiting the local interaction of PD-1 with PD-L1.

[0459] In one embodiment, the agent comprising the extracellular domain (ECD) of an inhibitory molecule, e.g., Programmed Death 1 (PD-1), can be fused to a transmembrane domain and intracellular signaling domains such as 4-1BB and CD3 zeta (also referred to herein as a PD1 CAR). In one embodiment, the PD1 CAR, when used in combinations with a CD19 CAR described herein, improves the persistence of the T cell. In one embodiment, the CAR is a PD1 CAR comprising the extracellular domain of PD-1 indicated as underlined in SEQ ID NO: 24 and a signal sequence at amino acids 1-21 of SEQ ID NO: 24. In one embodiment, the PD1 CAR comprises the amino acid sequence of SEQ ID NO: 24.

[0460] In one embodiment, the PD1 CAR without the N-terminal signal sequence comprises the amino acid sequence provided of SEQ ID NO: 22.

[0461] In one embodiment, the agent comprises a nucleic acid sequence encoding the PD1 CAR with the N-terminal signal sequence, e.g., the PD1 CAR described herein. In one embodiment, the nucleic acid sequence for the PD1 CAR is shown in Table 1, with the PD1 ECD underlined in SEQ ID NO: 23.

[0462] In another example, in one embodiment, the agent which enhances the activity of a CAR-expressing cell can be a costimulatory molecule or costimulatory molecule ligand. Examples of costimulatory molecules include MHC class I molecule, BTLA and a Toll ligand receptor, as well as OX40, CD27, CD28, CDS, ICAM-1, LFA-1 (CD11a/CD18), ICOS (CD278), and 4-1BB (CD137). Further examples of such costimulatory molecules include CDS, ICAM-1, GITR, BAFFR, HVEM (LIGHTR), SLAMF7, NKp80 (KLRF1), NKp44, NKp30, NKp46, CD160, CD19, CD4, CD8alpha, CD8beta, IL2R beta, IL2R gamma, IL7R alpha, ITGA4, VLA1, CD49a, ITGA4, IA4, CD49D, ITGA6, VLA-6, CD49f, ITGAD, CD11d, ITGAE, CD103, ITGAL, CD11a, LFA-1, ITGAM, CD11b, ITGAX, CD11c, ITGB1, CD29, ITGB2, CD18, LFA-1, ITGB7, NKG2D, NKG2C, TNFR2, TRANCE/RANKL, DNAM1 (CD226), SLAMF4 (CD244, 2B4), CD84, CD96 (Tactile), CEACAM1, CRTAM, Ly9 (CD229), CD160 (BY55), PSGL1, CD100 (SEMA4D), CD69, SLAMF6 (NTB-A, Ly108), SLAM (SLAMF1, CD150, IPO-3), BLAME (SLAMF8), SELPLG (CD162), LTBR, LAT, GADS, SLP-76, PAG/Cbp, CD19a, and a ligand that specifically binds with CD83., e.g., as described herein. Examples of costimulatory molecule ligands include CD80, CD86, CD4OL, ICOSL, CD70, OX4OL, 4-1BBL, GITRL, and LIGHT. In embodiments, the costimulatory molecule ligand is a ligand for a costimulatory molecule different from the costimulatory molecule domain of the CAR. In embodiments, the costimulatory molecule ligand is a ligand for a costimulatory molecule that is the same as the costimulatory molecule domain of the CAR. In an embodiment, the costimulatory molecule ligand is 4-1BBL. In an embodiment, the costimulatory ligand is CD80 or CD86. In an embodiment, the costimulatory molecule ligand is CD70. In embodiments, a CAR-expressing immune effector cell described herein can be further engineered to express one or more additional costimulatory molecules or costimulatory molecule ligands.

Co-Expression of CAR with a Chemokine Receptor

[0463] In embodiments, the CAR-expressing cell described herein, e.g., CD19 CAR-expressing cell, further comprises a chemokine receptor molecule. Transgenic expression of chemokine receptors CCR2b or CXCR2 in T cells enhances trafficking to CCL2- or CXCL1-secreting solid tumors including melanoma and neuroblastoma (Craddock et al., J Immunother. 2010 October; 33(8):780-8 and Kershaw et al., Hum Gene Ther. 2002 Nov. 1; 13(16):1971-80). Thus, without wishing to be bound by theory, it is believed that chemokine receptors expressed in CAR-expressing cells that recognize chemokines secreted by tumors, e.g., solid tumors, can improve homing of the CAR-expressing cell to the tumor, facilitate the infiltration of the CAR-expressing cell to the tumor, and enhances antitumor efficacy of the CAR-expressing cell. The chemokine receptor molecule can comprise a naturally occurring or recombinant chemokine receptor or a chemokine-binding fragment thereof. A chemokine receptor molecule suitable for expression in a CAR-expressing cell (e.g., CAR-Tx) described herein include a CXC chemokine receptor (e.g., CXCR1, CXCR2, CXCR3, CXCR4, CXCRS, CXCR6, or CXCR7), a CC chemokine receptor (e.g., CCR1, CCR2, CCR3, CCR4, CCRS, CCR6, CCR7, CCR8, CCR9, CCR10, or CCR11), a CX3C chemokine receptor (e.g., CX3CR1), a XC chemokine receptor (e.g., XCR1), or a chemokine-binding fragment thereof. In one embodiment, the chemokine receptor molecule to be expressed with a CAR described herein is selected based on the chemokine(s) secreted by the tumor. In one embodiment, the CAR-expressing cell described herein further comprises, e.g., expresses, a CCR2b receptor or a CXCR2 receptor. In an embodiment, the CAR described herein and the chemokine receptor molecule are on the same vector or are on two different vectors. In embodiments where the CAR described herein and the chemokine receptor molecule are on the same vector, the CAR and the chemokine receptor molecule are each under control of two different promoters or are under the control of the same promoter.

### Nucleic Acid Constructs Encoding a CAR

[0464] The present invention provides CAR transgenes comprising nucleic acid sequences encoding one or more CAR constructs of the invention. In one aspect, the CAR transgene is provided as a messenger RNA transcript. In one aspect, the CAR transgene is provided as a DNA construct.

[0465] Accordingly, in one aspect, the invention pertains to an isolated nucleic acid molecule encoding a chimeric antigen receptor (CAR), wherein the CAR comprises an anti-CD19 binding domain (e.g., a murine anti-CD19 binding domain or humanized anti-CD19 binding domain), a transmembrane domain, and an intracellular signaling domain comprising a stimulatory domain. In one embodiment, the anti-CD19 binding domain is an anti-CD19 binding domain described herein, e.g., an anti-CD19 binding domain which comprises a sequence selected from a group consisting of SEQ ID NO: 45-56, 69-80, 106, 109, 110, 112, or 115, or a sequence with 95-99% identify thereof. In one embodiment, the isolated nucleic acid molecule further comprises a sequence encoding a costimulatory domain. In one embodiment, the transmembrane domain is a transmembrane domain of a protein selected from the group consisting of the alpha, beta or zeta chain of the T-cell receptor, CD28, CD3 epsilon, CD45, CD4, CDS, CD8, CD9, CD16, CD22, CD33, CD37, CD64, CD80, CD86, CD134, CD137 and CD154. In one embodiment, the transmembrane domain comprises a sequence of SEQ ID NO: 6, or a sequence with 95-99% identity thereof. In one embodiment, the anti-CD19 binding domain is connected to the transmembrane domain by a hinge region, e.g., a hinge described herein. In one embodiment, the hinge region comprises SEQ ID NO: 2, SEQ ID NO: 3, SEQ ID NO: 4, SEQ ID NO: 5, SEQ ID NO: 16, or SEQ ID NO: 39, or a sequence with 95-99% identity thereof. In one embodiment, the isolated nucleic acid molecule further comprises a sequence encoding a costimulatory domain. In one embodiment, the costimulatory domain is a functional signaling domain of a protein selected from the group consisting of OX40, CD27, CD28, CDS, ICAM-1, LFA-1 (CD11a/CD18), ICOS (CD278), and 4-1BB (CD137). Further examples of such costimulatory molecules include CDS, ICAM-1, GITR, BAFFR, HVEM (LIGHTR), SLAMF7, NKp80 (KLRF1), NKp44, NKp30, NKp46, CD160, CD19, CD4, CD8alpha, CD8beta, IL2R beta, IL2R gamma, IL7R alpha, ITGA4, VLA1, CD49a, ITGA4, IA4, CD49D, ITGA6, VLA-6, CD49f, ITGAD, CD11d, ITGAE, CD103, ITGAL, CD11a, LFA-1, ITGAM, CD11b, ITGAX, CD11c, ITGB1, CD29, ITGB2, CD18, LFA-1, ITGB7, NKG2D, NKG2C, TNFR2, TRANCE/RANKL, DNAM1 (CD226), SLAMF4 (CD244, 2B4), CD84, CD96 (Tactile), CEACAM1, CRTAM, Ly9 (CD229), CD160 (BY55), PSGL1, CD100 (SEMA4D), CD69, SLAMF6 (NTB-A, Ly108), SLAM (SLAMF1, CD150, IPO-3), BLAME (SLAMF8), SELPLG (CD162), LTBR, LAT, GADS, SLP-76, and PAG/Cbp. In one embodiment, the costimulatory domain comprises a sequence of SEQ ID NO: 7, or a sequence with 95-99% identity thereof. In one embodiment, the intracellular signaling domain comprises a functional signaling domain of 4-1BB and a functional signaling domain of CD3 zeta. In one embodiment, the intracellular signaling domain comprises the sequence of SEQ ID NO: 7 or SEQ ID NO: 8, or a sequence with 95-99% identity thereof, and the sequence of SEQ ID NO: 9 or SEQ ID NO: 10, or a sequence with 95-99% identity thereof, wherein the sequences comprising the intracellular signaling domain are expressed in the same frame and as a single polypeptide chain. In another aspect, the invention pertains to an isolated nucleic acid molecule encoding a CAR construct comprising a leader sequence of SEQ ID NO: 1, a scFv domain having a sequence selected from the group consisting of SEQ ID NO: 45; SEQ ID NO: 46, SEQ ID NO: 47, SEQ ID NO: 48, SEQ ID NO: 49, SEQ ID NO: 50, SEQ ID NO: 51, SEQ ID NO: 52, SEQ ID NO: 53, SEQ ID NO: 54, SEQ ID NO: 55, SEQ ID NO: 56, SEQ ID NO: 69, SEQ ID NO: 70, SEQ ID NO: 71, SEQ ID NO: 72, SEQ ID NO: 73, SEQ ID NO: 74, SEQ ID NO: 75, SEQ ID NO: 76, SEQ ID NO: 77, SEQ ID NO: 78, SEQ ID NO: 79, SEQ ID NO: 80, SEQ ID NO: 106, SEQ ID NO: 109, SEQ ID NO: 110, SEQ ID NO: 112, and SEQ ID NO: 115 (or a sequence with 95-99% identify thereof), a hinge region of SEQ ID NO: 2, SEQ ID NO:3, SEQ ID NO:4, SEQ ID NO:5, SEQ ID NO: 16, or SEQ ID NO: 39 (or a sequence with 95-99% identity thereof), a transmembrane domain having a sequence of SEQ ID NO: 6 (or a sequence with 95-99% identity thereof), a 4-1BB costimulatory domain having a sequence of SEQ ID NO: 7 (or a sequence with 95-99% identity thereof) or a CD27 costimulatory domain having a sequence of SEQ ID NO: 8 (or a sequence with 95-99% identity thereof), and a CD3 zeta stimulatory domain having a sequence of SEQ ID NO: 9 or SEQ ID NO: 10 (or a sequence with 95-99% identity thereof).

[0466] In another aspect, the invention pertains to an isolated polypeptide molecule encoded by the nucleic acid molecule. In one embodiment, the isolated polypeptide molecule comprises a sequence selected from the group consisting of SEQ ID NO: 93; SEQ ID NO: 94, SEQ ID NO: 95, SEQ ID NO: 96, SEQ ID NO: 97, SEQ ID NO: 98, SEQ ID NO: 99, SEQ ID NO: 100, SEQ ID NO: 101, SEQ ID NO: 102, SEQ ID NO: 103, SEQ ID NO: 104, SEQ ID NO: 108, SEQ ID NO: 111, SEQ ID NO: 113, SEQ ID NO: 114, and SEQ ID NO: 116, or a sequence with 95-99% identity thereof.

[0467] In another aspect, the invention pertains to an isolated nucleic acid molecule encoding a chimeric antigen receptor (CAR) molecule that comprises an anti-CD19 binding domain, a transmembrane domain, and an intracellular signaling domain comprising a stimulatory domain, and wherein the nucleic acid encoding the anti-CD19 binding domain comprises a sequence selected from the group consisting of SEQ ID NO: 57; SEQ ID NO: 58, SEQ ID NO: 59, SEQ ID NO: 60, SEQ ID NO: 61, SEQ ID NO: 62, SEQ ID NO: 63, SEQ ID NO: 64, SEQ ID NO: 65, SEQ ID NO: 66, SEQ ID NO: 67, SEQ ID NO: 68, and SEQ ID NO: 105, ora sequence with 95-99% identify thereof.

[0468] In one embodiment, the encoded CAR molecule further comprises a sequence encoding a costimulatory domain. In one embodiment, the costimulatory domain is a functional signaling domain of a protein selected from the group consisting of OX40, CD27, CD28, CDS, ICAM-1, LFA-1 (CD11a/CD18) and 4-1BB (CD137). In one embodiment, the costimulatory domain comprises a sequence of SEQ ID NO: 7. In one embodiment, the transmembrane domain is a transmembrane domain of a protein selected from the group consisting of the alpha, beta or zeta chain of the T-cell receptor, CD28, CD3 epsilon, CD45, CD4, CDS, CD8, CD9, CD16, CD22, CD33, CD37, CD64, CD80, CD86, CD134, CD137 and CD154. In one embodiment, the transmembrane domain comprises a sequence of SEQ ID NO: 6. In one embodiment, the intracellular signaling domain comprises a functional signaling domain of 4-1BB and a functional signaling domain of zeta. In one embodiment, the intracellular signaling domain comprises the sequence of SEQ ID NO: 7 and the sequence of SEQ ID NO: 9, wherein the sequences comprising the intracellular signaling domain are expressed in the same frame and as a single polypeptide chain. In one embodiment, the anti-CD19 binding domain is connected to the transmembrane domain by a hinge region. In one embodiment, the hinge region comprises SEQ ID NO: 2. In one embodiment, the hinge region comprises SEQ ID NO: 3, SEQ ID NO: 4, SEQ ID NO: 5, SEQ ID NO: 16, or SEQ ID NO: 39.

[0469] In another aspect, the invention pertains to an isolated CAR molecule comprising a leader sequence of SEQ ID NO: 1, a scFv domain having a sequence selected from the group consisting of SEQ ID NOS: 45-56, 109, 110, 112, and 115, or a sequence with 95-99% identify thereof, a hinge region of SEQ ID NO:2, SEQ ID NO: 3, SEQ ID NO: 4, SEQ ID NO: 5, SEQ ID NO: 16, or SEQ ID NO: 39, a transmembrane domain having a sequence of SEQ ID NO: 6, a 4-1BB costimulatory domain having a sequence of SEQ ID NO: 7 or a CD27 costimulatory domain having a sequence of SEQ ID NO: 8, and a CD3 zeta stimulatory domain having a sequence of SEQ ID NO: 9 or SEQ ID NO: 10. In one embodiment, the encoded CAR molecule comprises a sequence selected from the group consisting of SEQ ID NOS: 93-104, 108, 111, 114, 116, or a sequence with 95-99% identify thereof.

[0470] The present invention further provides vectors comprising CAR transgenes. In one aspect, a CAR vectors can be directly transduced into a cell, e.g., a T cell or NK cell. In one aspect, the vector is a cloning or expression vector, e.g., a vector including, but not limited to, one or more plasmids (e.g., expression plasmids, cloning vectors, minicircles, minivectors, double minute chromosomes), retroviral and lentiviral vector constructs. In one aspect, the vector is capable of expressing the CAR construct in mammalian T cells or NK cells. In one aspect, the mammalian T cell is a human T cell or a human NK cell.

[0471] The present invention also includes a CAR encoding RNA construct that can be directly transfected into a cell, e.g., a T cell or a NK cell. A method for generating mRNA for use in transfection involves in vitro transcription (IVT) of a template with specially designed primers, followed by polyA addition, to produce a construct containing 3′ and 5′ untranslated sequence (“UTR”), a 5′ cap and/or Internal Ribosome Entry Site (IRES), the gene to be expressed, and a polyA tail, typically 50-2000 bases in length (SEQ ID NO: 35). RNA so produced can efficiently transfect different kinds of cells. In one aspect, the template includes sequences for the CAR.

[0472] In one aspect the CAR (e.g., CD19 CAR) transgene is encoded by a messenger RNA (mRNA). In one aspect the mRNA encoding the CAR transgene is introduced into a T cell for production of a CART cell, or a NK cell.

### Vectors

[0473] The present invention also provides vectors in which a DNA of the present invention is inserted. Vectors derived from retroviruses such as the lentivirus are suitable tools to achieve long-term gene transfer since they allow long-term, stable integration of a transgene and its propagation in daughter cells. Lentiviral vectors have the added advantage over vectors derived from onco-retroviruses such as murine leukemia viruses in that they can transduce non-proliferating cells, such as hepatocytes. They also have the added advantage of low immunogenicity.

[0474] In one embodiment, the vector comprising the nucleic acid encoding the desired CAR of the invention is a DNA, a RNA, a plasmid, an adenoviral vector, a lentivirus vector, or a retrovirus vector. A retroviral vector may also be, e.g., a gammaretroviral vector. A gammaretroviral vector may include, e.g., a promoter, a packaging signal (ψ), a primer binding site (PBS), one or more (e.g., two) long terminal repeats (LTR), and a transgene of interest, e.g., a gene encoding a CAR. A gammaretroviral vector may lack viral structural gens such as gag, pol, and env. Exemplary gammaretroviral vectors include Murine Leukemia Virus (MLV), Spleen-Focus Forming Virus (SFFV), and Myeloproliferative Sarcoma Virus (MPSV), and vectors derived therefrom. Other gammaretroviral vectors are described, e.g., in Tobias Maetzig et al., “Gammaretroviral Vectors: Biology, Technology and Application” Viruses. 2011 June; 3(6): 677-713.

[0475] In another embodiment, the vector comprising the nucleic acid encoding the desired CAR of the invention is an adenoviral vector (A5/35). In another embodiment, the expression of nucleic acids encoding CARs can be accomplished using of transposons such as sleeping beauty, CRISPR, CAS9, and zinc finger nucleases. See, e.g., June et al. 2009 Nature Reviews Immunology 9.10: 704-716, incorporated herein by reference in its entirety.

[0476] In brief summary, the expression of natural or synthetic nucleic acids encoding CARs is typically achieved by operably linking a nucleic acid encoding the CAR polypeptide or portions thereof to a promoter, and incorporating the construct into an expression vector. The vectors can be suitable for replication and integration eukaryotes. Typical cloning vectors contain transcription and translation terminators, initiation sequences, and promoters useful for regulation of the expression of the desired nucleic acid sequence.

[0477] The expression constructs of the present invention may also be used for nucleic acid immunization and gene therapy, using standard gene delivery protocols. Methods for gene delivery are known in the art. See, e.g., U.S. Pat. Nos. 5,399,346, 5,580,859, 5,589,466, incorporated by reference herein in their entireties. In another embodiment, the invention provides a gene therapy vector.

[0478] The nucleic acid can be cloned into a number of types of vectors. For example, the nucleic acid can be cloned into a vector including, but not limited to a plasmid, a phagemid, a phage derivative, an animal virus, and a cosmid. Vectors of particular interest include expression vectors, replication vectors, probe generation vectors, and sequencing vectors.

[0479] Further, the expression vector may be provided to a cell in the form of a viral vector. Viral vector technology is well known in the art and is described, for example, in Sambrook et al., 2012, MOLECULAR CLONING: A LABORATORY MANUAL, volumes 1-4, Cold Spring Harbor Press, NY), and in other virology and molecular biology manuals. Viruses, which are useful as vectors include, but are not limited to, retroviruses, adenoviruses, adeno-associated viruses, herpes viruses, and lentiviruses. In general, a suitable vector contains an origin of replication functional in at least one organism, a promoter sequence, convenient restriction endonuclease sites, and one or more selectable markers, (e.g., WO 01/96584; WO 01/29058; and U.S. Pat. No. 6,326,193).

[0480] A number of viral based systems have been developed for gene transfer into mammalian cells. For example, retroviruses provide a convenient platform for gene delivery systems. A selected gene can be inserted into a vector and packaged in retroviral particles using techniques known in the art. The recombinant virus can then be isolated and delivered to cells of the subject either in vivo or ex vivo. A number of retroviral systems are known in the art. In some embodiments, adenovirus vectors are used. A number of adenovirus vectors are known in the art. In one embodiment, lentivirus vectors are used.

[0481] Additional promoter elements, e.g., enhancers, regulate the frequency of transcriptional initiation. Typically, these are located in the region 30-110 bp upstream of the start site, although a number of promoters have been shown to contain functional elements downstream of the start site as well. The spacing between promoter elements frequently is flexible, so that promoter function is preserved when elements are inverted or moved relative to one another. In the thymidine kinase (tk) promoter, the spacing between promoter elements can be increased to 50 bp apart before activity begins to decline. Depending on the promoter, it appears that individual elements can function either cooperatively or independently to activate transcription. Exemplary promoters include the CMV IE gene, EF-1α, ubiquitin C, or phosphoglycerokinase (PGK) promoters.

[0482] An example of a promoter that is capable of expressing a CAR transgene in a mammalian T cell is the EF1alpha promoter (EF1a or EF1α). The native EF1a promoter drives expression of the alpha subunit of the elongation factor-1 complex, which is responsible for the enzymatic delivery of aminoacyl tRNAs to the ribosome. The EF1a promoter has been extensively used in mammalian expression plasmids and has been shown to be effective in driving CAR expression from transgenes cloned into a lentiviral vector. See, e.g., Milone et al., Mol. Ther. 17(8): 1453-1464 (2009). In one aspect, the EF1a promoter comprises the sequence provided as SEQ ID NO:11.

[0483] Another example of a promoter is the immediate early cytomegalovirus (CMV) promoter sequence. This promoter sequence is a strong constitutive promoter sequence capable of driving high levels of expression of any polynucleotide sequence operatively linked thereto. However, other constitutive promoter sequences may also be used, including, but not limited to the simian virus 40 (SV40) early promoter, mouse mammary tumor virus (MMTV), human immunodeficiency virus (HIV) long terminal repeat (LTR) promoter, MoMuLV promoter, an avian leukemia virus promoter, an Epstein-Barr virus immediate early promoter, a Rous sarcoma virus promoter, as well as human gene promoters such as, but not limited to, the actin promoter, the myosin promoter, the elongation factor-1a promoter, the hemoglobin promoter, and the creatine kinase promoter. Further, the invention should not be limited to the use of constitutive promoters. Inducible promoters are also contemplated as part of the invention. The use of an inducible promoter provides a molecular switch capable of turning on expression of the polynucleotide sequence which it is operatively linked when such expression is desired, or turning off the expression when expression is not desired. Examples of inducible promoters include, but are not limited to a metallothionine promoter, a glucocorticoid promoter, a progesterone promoter, and a tetracycline promoter.

[0484] Another example of a promoter is the phosphoglycerate kinase (PGK) promoter. In embodiments, a truncated PGK promoter (e.g., a PGK promoter with one or more, e.g., 1, 2, 5, 10, 100, 200, 300, or 400, nucleotide deletions when compared to the wild-type PGK promoter sequence) may be desired. The nucleotide sequences of exemplary PGK promoters are provided as wild type PGK promoter in SEQ ID NO: 126, or truncated version of the PGK promoter, e.g., PGK100 as provided in SEQ ID NO: 127, PGK200 as provided in SEQ ID NO: 128, PGK300 as provided in SEQ ID NO: 129, and PGK400 as provided in SEQ ID NO: 130.

[0485] A vector may also include, e.g., a signal sequence to facilitate secretion, a polyadenylation signal and transcription terminator (e.g., from Bovine Growth Hormone (BGH) gene), an element allowing episomal replication and replication in prokaryotes (e.g. SV40 origin and ColE1 or others known in the art) and/or elements to allow selection (e.g., ampicillin resistance gene and/or zeocin marker).

[0486] In order to assess the expression of a CAR polypeptide or portions thereof, the expression vector to be introduced into a cell can also contain either a selectable marker gene or a reporter gene or both to facilitate identification and selection of expressing cells from the population of cells sought to be transfected or infected through viral vectors. In other aspects, the selectable marker may be carried on a separate piece of DNA and used in a co-transfection procedure. Both selectable markers and reporter genes may be flanked with appropriate regulatory sequences to enable expression in the host cells. Useful selectable markers include, for example, antibiotic-resistance genes, such as neo and the like.

[0487] Reporter genes are used for identifying potentially transfected cells and for evaluating the functionality of regulatory sequences. In general, a reporter gene is a gene that is not present in or expressed by the recipient organism or tissue and that encodes a polypeptide whose expression is manifested by some easily detectable property, e.g., enzymatic activity. Expression of the reporter gene is assayed at a suitable time after the DNA has been introduced into the recipient cells. Suitable reporter genes may include genes encoding luciferase, beta-galactosidase, chloramphenicol acetyl transferase, secreted alkaline phosphatase, or the green fluorescent protein gene (e.g., Ui-Tei et al., 2000 FEBS Letters 479: 79-82). Suitable expression systems are well known and may be prepared using known techniques or obtained commercially. In general, the construct with the minimal 5′ flanking region showing the highest level of expression of reporter gene is identified as the promoter. Such promoter regions may be linked to a reporter gene and used to evaluate agents for the ability to modulate promoter-driven transcription.

[0488] In one embodiment, the vector can further comprise a nucleic acid encoding a second CAR. In one embodiment, the second CAR includes an antigen binding domain to, e.g., a target other than CD19 (e.g., a B cell antigen other than CD19, e.g., CD10, CD20, CD22, CD34, CD123, FLT-3, ROR1, CD79b, CD179b, or CD79a). In one embodiment, the vector comprises a nucleic acid sequence encoding a first CAR that targets a first antigen and includes an intracellular signaling domain having a costimulatory signaling domain but not a primary signaling domain, and a nucleic acid encoding a second CAR that targets a second, different, antigen and includes an intracellular signaling domain having a primary signaling domain but not a costimulatory signaling domain. In one embodiment, the vector comprises a nucleic acid encoding a first CD19 CAR that includes a CD19 binding domain, a transmembrane domain and a costimulatory domain and a nucleic acid encoding a second CAR that targets an antigen other than CD19 (e.g., a B cell antigen other than CD19, e.g., CD10, CD20, CD22, CD34, CD123, FLT-3, ROR1, CD79b, CD179b, or CD79a) and includes an antigen binding domain, a transmembrane domain and a primary signaling domain. In another embodiment, the vector comprises a nucleic acid encoding a first CD19 CAR that includes a CD19 binding domain, a transmembrane domain and a primary signaling domain and a nucleic acid encoding a second CAR that targets an antigen other than CD19 (e.g., a B cell antigen other than CD19, e.g., CD10, CD20, CD22, CD34, CD123, FLT-3, ROR1, CD79b, CD179b, or CD79a) and includes an antigen binding domain to the antigen, a transmembrane domain and a costimulatory signaling domain.

[0489] In one embodiment, the vector comprises a nucleic acid encoding a CAR (e.g., CD19 CAR) described herein and a nucleic acid encoding an inhibitory CAR. In one embodiment, the inhibitory CAR comprises an antigen binding domain that binds an antigen found on normal cells but not cancer cells, e.g., normal cells that also express CD19. In one embodiment, the inhibitory CAR comprises the antigen binding domain, a transmembrane domain and an intracellular domain of an inhibitory molecule. For example, the intracellular domain of the inhibitory CAR can be an intracellular domain of PD1, PD-L1, CTLA4, TIM3, CEACAM (e.g., CEACAM-1, CEACAM-3 and/or CEACAM-5), LAGS, VISTA, BTLA, TIGIT, LAIR1, CD160, 2B4 and/or TGF beta.

[0490] In embodiments, the vector may comprise two or more nucleic acid sequences, wherein one of the nucleic acid sequences encodes a CAR described herein, e.g., a CD19 CAR described herein. In one embodiment, the other nucleic acid can encode a second CAR, e.g., an inhibitory CAR or a specifically binds to an antigen other than CD19 (e.g., a B cell antigen other than CD19, e.g., CD10, CD20, CD22, CD34, CD123, FLT-3, ROR1, CD79b, CD179b, or CD79a), or a polypeptide that can regulate activity of the CAR (e.g., CD19 CAR) described herein. In such embodiments, the two or more nucleic acid sequences, e.g., encoding a CAR (e.g., CD19 CAR) described herein and a second CAR or other polypeptide, are encoded by a single nucleic molecule in the same frame and as a single polypeptide chain. In one embodiment, the two or more polypeptides can be separated by one or more peptide cleavage sites (e.g., an auto-cleavage site or a substrate for an intracellular protease). Examples of peptide cleavage sites include the following, wherein the GSG residues are optional:T2A as provided in SEQ ID NO: 131, P2A as provided in SEQ ID NO: 132, E2A as provided in SEQ ID NO: 133, and F2A as provided in SEQ ID NO: 134.

[0491] Methods of introducing and expressing genes into a cell are known in the art. In the context of an expression vector, the vector can be readily introduced into a host cell, e.g., mammalian, bacterial, yeast, or insect cell by any method in the art and are described in pages 208-210 of International Application WO 2016/164731, filed Apr. 8, 2016, which is incorporated by reference in its entirety.

[0492] The present invention further provides a vector comprising a CAR encoding nucleic acid molecule. In one aspect, a CAR vector can be directly transduced into a cell, e.g., a T cell or a NK cell. In one aspect, the vector is a cloning or expression vector, e.g., a vector including, but not limited to, one or more plasmids (e.g., expression plasmids, cloning vectors, minicircles, minivectors, double minute chromosomes), retroviral and lentiviral vector constructs. In one aspect, the vector is capable of expressing the CAR construct in mammalian T cells. In one aspect, the mammalian T cell is a human T cell. In one aspect, the mammalian cell is a human NK cell.

### RNA Transfection

[0493] Disclosed herein are methods for producing an in vitro transcribed RNA CAR. The present invention also includes a CAR encoding RNA construct that can be directly transfected into a cell. A method for generating mRNA for use in transfection can involve in vitro transcription (IVT) of a template with specially designed primers, followed by polyA addition, to produce a construct containing 3′ and 5′ untranslated sequence (“UTR”), a 5′ cap and/or Internal Ribosome Entry Site (IRES), the nucleic acid to be expressed, and a polyA tail, typically 50-2000 bases in length (SEQ ID NO:35). RNA so produced can efficiently transfect different kinds of cells. In one aspect, the template includes sequences for the CAR.

[0494] In one aspect the CAR (e.g., CD19 CAR) is encoded by a messenger RNA (mRNA). In one aspect the mRNA encoding the CAR is introduced into an immune effector cells, e.g., a T cell or a NK cell, for production of a CAR-expressing cell, e.g., a CART cell or a CAR NK cell. Additional methods of RNA transfection are described on pages 192-196 of International Application WO 2016/164731, filed Apr. 8, 2016, which is incorporated by reference in its entirety.

### Non-Viral Delivery Methods

[0495] In some aspects, non-viral methods can be used to deliver a nucleic acid encoding a CAR described herein into a cell or tissue or a subject. In some embodiments, the non-viral method includes the use of a transposon (also called a transposable element). In some embodiments, a transposon is a piece of DNA that can insert itself at a location in a genome, for example, a piece of DNA that is capable of self-replicating and inserting its copy into a genome, or a piece of DNA that can be spliced out of a longer nucleic acid and inserted into another place in a genome. Additional and exemplary transposons and non-viral delivery methods are described on pages 196-198 of International Application WO 2016/164731, filed Apr. 8, 2016, which is incorporated by reference in its entirety.

### Sources of Cells

[0496] Prior to expansion and genetic modification, e.g., to express a CAR described herein, a source of cells, e.g., T cell or NK cells, can be obtained from a subject. The term “subject” is intended to include living organisms in which an immune response can be elicited (e.g., mammals). Examples of subjects include humans, dogs, cats, mice, rats, and transgenic species thereof.

[0497] In embodiments, immune effector cells (e.g., a population of immune effector cells), e.g., T cells, are derived from (e.g., differentiated from) a stem cell, e.g., an embryonic stem cell or a pluripotent stem cell, e.g., an induced pluripotent stem cell (iPSC). In embodiments, the cells are autologous or allogeneic. In embodiments wherein the cells are allogeneic, the cells, e.g., derived from stem cells (e.g., iPSCs), are modified to reduce their alloreactivity. For example, the cells can be modified to reduce alloreactivity, e.g., by modifying (e.g., disrupting) their T cell receptor. In embodiments, a site specific nuclease can be used to disrupt the T cell receptor, e.g., after T-cell differentiation. In other examples, cells, e.g., T cells derived from iPSCs, can be generated from virus-specific T cells, which are less likely to cause graft-versus-host disease because of their recognition of a pathogen-derived antigen. In yet other examples, alloreactivity can be reduced, e.g., minimized, by generating iPSCs from common HLA haplotypes such that they are histocompatible with matched, unrelated recipient subjects. In yet other examples, alloreactivity can be reduced, e.g., minimized, by repressing HLA expression through genetic modification. For example, T cells derived from iPSCs can be processed as described in, e.g., Themeli et al. Nat. Biotechnol. 31.10(2013):928-35, incorporated herein by reference. In some examples, immune effector cells, e.g., T cells, derived from stem cells, can be processed/generated using methods described in WO2014/165707, incorporated herein by reference. Additional embodiments pertaining to allogeneic cells are described herein, e.g., in the “Allogeneic CAR Immune Effector Cells” section herein.

[0498] T cells can be obtained from a number of sources, including peripheral blood mononuclear cells, bone marrow, lymph node tissue, cord blood, thymus tissue, tissue from a site of infection, ascites, pleural effusion, spleen tissue, and tumors. In certain aspects of the present disclosure, any number of T cell lines available in the art, may be used. In certain aspects of the present disclosure, T cells can be obtained from a unit of blood collected from a subject using any number of techniques known to the skilled artisan, such as Ficoll™ separation. In one preferred aspect, cells from the circulating blood of an individual are obtained by apheresis. The apheresis product typically contains lymphocytes, including T cells, monocytes, granulocytes, B cells, other nucleated white blood cells, red blood cells, and platelets. In one aspect, the cells collected by apheresis may be washed to remove the plasma fraction and to place the cells in an appropriate buffer or media for subsequent processing steps. In one aspect of the invention, the cells are washed with phosphate buffered saline (PBS). In an alternative aspect, the wash solution lacks calcium and may lack magnesium or may lack many if not all divalent cations. Initial activation steps in the absence of calcium can lead to magnified activation. As those of ordinary skill in the art would readily appreciate a washing step may be accomplished by methods known to those in the art, such as by using a semi-automated “flow-through” centrifuge (for example, the Cobe 2991 cell processor, the Baxter CytoMate, or the Haemonetics Cell Saver 5) according to the manufacturer's instructions. After washing, the cells may be resuspended in a variety of biocompatible buffers, such as, for example, Ca-free, Mg-free PBS, PlasmaLyte A, or other saline solution with or without buffer. Alternatively, the undesirable components of the apheresis sample may be removed and the cells directly resuspended in culture media.

[0499] It is recognized that the methods of the application can utilize culture media conditions comprising 5% or less, for example 2%, human AB serum, and employ known culture media conditions and compositions, for example those described in Smith et al., “Ex vivo expansion of human T cells for adoptive immunotherapy using the novel Xeno-free CTS Immune Cell Serum Replacement” Clinical & Translational Immunology (2015) 4, e31; doi:10.1038/cti.2014.31.

[0500] In one aspect, T cells are isolated from peripheral blood lymphocytes by lysing the red blood cells and depleting the monocytes, for example, by centrifugation through a PERCOLL™ gradient or by counterflow centrifugal elutriation. A specific subpopulation of T cells, such as CD3+, CD28+, CD4+, CD8+, CD45RA+, and CD45RO+T cells, can be further isolated by positive or negative selection techniques. For example, in one aspect, T cells are isolated by incubation with anti-CD3/anti-CD28 (e.g., 3×28)-conjugated beads, such as DYNABEADS® M-450 CD3/CD28 T, for a time period sufficient for positive selection of the desired T cells. In one aspect, the time period is about 30 minutes. In a further aspect, the time period ranges from 30 minutes to 36 hours or longer and all integer values there between. In a further aspect, the time period is at least 1, 2, 3, 4, 5, or 6 hours. In yet another preferred aspect, the time period is 10 to 24 hours. In one aspect, the incubation time period is 24 hours. Longer incubation times may be used to isolate T cells in any situation where there are few T cells as compared to other cell types, such in isolating tumor infiltrating lymphocytes (TIL) from tumor tissue or from immunocompromised individuals. Further, use of longer incubation times can increase the efficiency of capture of CD8+ T cells. Thus, by simply shortening or lengthening the time T cells are allowed to bind to the CD3/CD28 beads and/or by increasing or decreasing the ratio of beads to T cells (as described further herein), subpopulations of T cells can be preferentially selected for or against at culture initiation or at other time points during the process. Additionally, by increasing or decreasing the ratio of anti-CD3 and/or anti-CD28 antibodies on the beads or other surface, subpopulations of T cells can be preferentially selected for or against at culture initiation or at other desired time points. The skilled artisan would recognize that multiple rounds of selection can also be used in the context of this invention. In certain aspects, it may be desirable to perform the selection procedure and use the “unselected” cells in the activation and expansion process. “Unselected” cells can also be subjected to further rounds of selection.

[0501] Enrichment of a T cell population by negative selection can be accomplished with a combination of antibodies directed to surface markers unique to the negatively selected cells. One method is cell sorting and/or selection via negative magnetic immunoadherence or flow cytometry that uses a cocktail of monoclonal antibodies directed to cell surface markers present on the cells negatively selected. For example, to enrich for CD4+ cells by negative selection, a monoclonal antibody cocktail typically includes antibodies to CD14, CD20, CD11b, CD16, HLA-DR, and CD8. In certain aspects, it may be desirable to enrich for or positively select for regulatory T cells which typically express CD4+, CD25+, CD62Lhi, GITR+, and FoxP3+. Alternatively, in certain aspects, T regulatory cells are depleted by anti-C25 conjugated beads or other similar method of selection.

[0502] The methods described herein can include, e.g., selection of a specific subpopulation of immune effector cells, e.g., T cells, that are a T regulatory cell-depleted population, CD25+ depleted cells, using, e.g., a negative selection technique, e.g., described herein. Preferably, the population of T regulatory depleted cells contains less than 30%, 25%, 20%, 15%, 10%, 5%, 4%, 3%, 2%, 1% of CD25+ cells.

[0503] In one embodiment, T regulatory cells, e.g., CD25+ T cells, are removed from the population using an anti-CD25 antibody, or fragment thereof, or a CD25-binding ligand, IL-2. In one embodiment, the anti-CD25 antibody, or fragment thereof, or CD25-binding ligand is conjugated to a substrate, e.g., a bead, or is otherwise coated on a substrate, e.g., a bead. In one embodiment, the anti-CD25 antibody, or fragment thereof, is conjugated to a substrate as described herein.

[0504] In one embodiment, the T regulatory cells, e.g., CD25+ T cells, are removed from the population using CD25 depletion reagent from Miltenyi™. In one embodiment, the ratio of cells to CD25 depletion reagent is 1e7 cells to 20 uL, or 1e7 cells to15 uL, or 1e7 cells to 10 uL, or 1e7 cells to 5 uL, or 1e7 cells to 2.5 uL, or 1e7 cells to 1.25 uL. In one embodiment, e.g., for T regulatory cells, e.g., CD25+ depletion, greater than 500 million cells/ml is used. In a further aspect, a concentration of cells of 600, 700, 800, or 900 million cells/ml is used.

[0505] In one embodiment, the population of immune effector cells to be depleted includes about 6×10⁹ CD25+ T cells. In other aspects, the population of immune effector cells to be depleted include about 1×10⁹ to 1×10¹⁰ CD25+ T cell, and any integer value in between. In one embodiment, the resulting population T regulatory depleted cells has 2×10⁹ T regulatory cells, e.g., CD25+ cells, or less (e.g., 1×10⁹, 5×10⁸, 1×10⁸, 5×10⁷, 1×10⁷, or less CD25+ cells).

[0506] In one embodiment, the T regulatory cells, e.g., CD25+ cells, are removed from the population using the CliniMAC system with a depletion tubing set, such as, e.g., tubing 162-01. In one embodiment, the CliniMAC system is run on a depletion setting such as, e.g., DEPLETION2.1.

[0507] Without wishing to be bound by a particular theory, decreasing the level of negative regulators of immune cells (e.g., decreasing the number of unwanted immune cells, e.g., T_{REG} cells), in a subject prior to apheresis or during manufacturing of a CAR-expressing cell product can reduce the risk of subject relapse. For example, methods of depleting T_{REG} cells are known in the art. Methods of decreasing T_{REG} cells include, but are not limited to, cyclophosphamide, anti-GITR antibody (an anti-GITR antibody described herein), CD25-depletion, and combinations thereof.

[0508] In some embodiments, the manufacturing methods comprise reducing the number of (e.g., depleting) T_{REG} cells prior to manufacturing of the CAR-expressing cell. For example, manufacturing methods comprise contacting the sample, e.g., the apheresis sample, with an anti-GITR antibody and/or an anti-CD25 antibody (or fragment thereof, or a CD25-binding ligand), e.g., to deplete T_{REG} cells prior to manufacturing of the CAR-expressing cell (e.g., T cell, NK cell) product.

[0509] In an embodiment, a subject is pre-treated with one or more therapies that reduce T_{REG} cells prior to collection of cells for CAR-expressing cell product manufacturing, thereby reducing the risk of subject relapse to CAR-expressing cell treatment. In an embodiment, methods of decreasing T_{REG} cells include, but are not limited to, administration to the subject of one or more of cyclophosphamide, anti-GITR antibody, CD25-depletion, or a combination thereof. Administration of one or more of cyclophosphamide, anti-GITR antibody, CD25-depletion, or a combination thereof, can occur before, during or after an infusion of the CAR-expressing cell product.

[0510] In an embodiment, a subject is pre-treated with cyclophosphamide prior to collection of cells for CAR-expressing cell product manufacturing, thereby reducing the risk of subject relapse to CAR-expressing cell treatment. In an embodiment, a subject is pre-treated with an anti-GITR antibody prior to collection of cells for CAR-expressing cell product manufacturing, thereby reducing the risk of subject relapse to CAR-expressing cell treatment.

[0511] In one embodiment, the population of cells to be removed are neither the regulatory T cells or tumor cells, but cells that otherwise negatively affect the expansion and/or function of CART cells, e.g. cells expressing CD14, CD11b, CD33, CD15, or other markers expressed by potentially immune suppressive cells. In one embodiment, such cells are envisioned to be removed concurrently with regulatory T cells and/or tumor cells, or following said depletion, or in another order.

[0512] The methods described herein can include more than one selection step, e.g., more than one depletion step. Enrichment of a T cell population by negative selection can be accomplished, e.g., with a combination of antibodies directed to surface markers unique to the negatively selected cells. One method is cell sorting and/or selection via negative magnetic immunoadherence or flow cytometry that uses a cocktail of monoclonal antibodies directed to cell surface markers present on the cells negatively selected. For example, to enrich for CD4+ cells by negative selection, a monoclonal antibody cocktail can include antibodies to CD14, CD20, CD11b, CD16, HLA-DR, and CD8.

[0513] The methods described herein can further include removing cells from the population which express a tumor antigen, e.g., a tumor antigen that does not comprise CD25, e.g., CD19, CD30, CD38, CD123, CD20, CD14 or CD11b, to thereby provide a population of T regulatory depleted, e.g., CD25+ depleted, and tumor antigen depleted cells that are suitable for expression of a CAR, e.g., a CAR described herein. In one embodiment, tumor antigen expressing cells are removed simultaneously with the T regulatory, e.g., CD25+ cells. For example, an anti-CD25 antibody, or fragment thereof, and an anti-tumor antigen antibody, or fragment thereof, can be attached to the same substrate, e.g., bead, which can be used to remove the cells or an anti-CD25 antibody, or fragment thereof, or the anti-tumor antigen antibody, or fragment thereof, can be attached to separate beads, a mixture of which can be used to remove the cells. In other embodiments, the removal of T regulatory cells, e.g., CD25+ cells, and the removal of the tumor antigen expressing cells is sequential, and can occur, e.g., in either order.

[0514] Also provided are methods that include removing cells from the population which express a check point inhibitor, e.g., a check point inhibitor described herein, e.g., one or more of PD1+ cells, LAG3+ cells, and TIM3+ cells, to thereby provide a population of T regulatory depleted, e.g., CD25+ depleted cells, and check point inhibitor depleted cells, e.g., PD1+, LAG3+ and/or TIM3+ depleted cells. Exemplary check point inhibitors include B7-H1, B7-1, CD160, P1H, 2B4, PD1, TIM3, CEACAM (e.g., CEACAM-1, CEACAM-3 and/or CEACAM-5), LAG3, TIGIT, CTLA-4, BTLA and LAIR1. In one embodiment, check point inhibitor expressing cells are removed simultaneously with the T regulatory, e.g., CD25+ cells. For example, an anti-CD25 antibody, or fragment thereof, and an anti-check point inhibitor antibody, or fragment thereof, can be attached to the same bead which can be used to remove the cells, or an anti-CD25 antibody, or fragment thereof, and the anti-check point inhibitor antibody, or fragment there, can be attached to separate beads, a mixture of which can be used to remove the cells. In other embodiments, the removal of T regulatory cells, e.g., CD25+ cells, and the removal of the check point inhibitor expressing cells is sequential, and can occur, e.g., in either order.

[0515] In one embodiment, a T cell population can be selected that expresses one or more of IFN-γ, TNFα, IL-17A, IL-2, IL-3, IL-4, GM-CSF, IL-10, IL-13, granzyme B, and perforin, or other appropriate molecules, e.g., other cytokines. Methods for screening for cell expression can be determined, e.g., by the methods described in PCT Publication No.: WO 2013/126712.

[0516] For isolation of a desired population of cells by positive or negative selection, the concentration of cells and surface (e.g., particles such as beads) can be varied. In certain aspects, it may be desirable to significantly decrease the volume in which beads and cells are mixed together (e.g., increase the concentration of cells), to ensure maximum contact of cells and beads. For example, in one aspect, a concentration of 2 billion cells/ml is used. In one aspect, a concentration of 1 billion cells/ml is used. In a further aspect, greater than 100 million cells/ml is used. In a further aspect, a concentration of cells of 10, 15, 20, 25, 30, 35, 40, 45, or 50 million cells/ml is used. In yet one aspect, a concentration of cells from 75, 80, 85, 90, 95, or 100 million cells/ml is used. In further aspects, concentrations of 125 or 150 million cells/ml can be used. Using high concentrations can result in increased cell yield, cell activation, and cell expansion. Further, use of high cell concentrations allows more efficient capture of cells that may weakly express target antigens of interest, such as CD28-negative T cells, or from samples where there are many tumor cells present (e.g., leukemic blood, tumor tissue, etc.). Such populations of cells may have therapeutic value and would be desirable to obtain. For example, using high concentration of cells allows more efficient selection of CD8+ T cells that normally have weaker CD28 expression.

[0517] In a related aspect, it may be desirable to use lower concentrations of cells. By significantly diluting the mixture of T cells and surface (e.g., particles such as beads), interactions between the particles and cells is minimized. This selects for cells that express high amounts of desired antigens to be bound to the particles. For example, CD4+ T cells express higher levels of CD28 and are more efficiently captured than CD8+ T cells in dilute concentrations. In one aspect, the concentration of cells used is 5×10e6/ml. In other aspects, the concentration used can be from about 1×10⁵/ml to 1×10⁶/ml, and any integer value in between.

[0518] In other aspects, the cells may be incubated on a rotator for varying lengths of time at varying speeds at either 2-10° C. or at room temperature.

[0519] T cells for stimulation can also be frozen after a washing step. Wishing not to be bound by theory, the freeze and subsequent thaw step provides a more uniform product by removing granulocytes and to some extent monocytes in the cell population. After the washing step that removes plasma and platelets, the cells may be suspended in a freezing solution. While many freezing solutions and parameters are known in the art and will be useful in this context, one method involves using PBS containing 20% DMSO and 8% human serum albumin, or culture media containing 10% Dextran 40 and 5% Dextrose, 20% Human Serum Albumin and 7.5% DMSO, or 31.25% Plasmalyte-A, 31.25% Dextrose 5%, 0.45% NaCl, 10% Dextran 40 and 5% Dextrose, 20% Human Serum Albumin, and 7.5% DMSO or other suitable cell freezing media containing for example, Hespan and PlasmaLyte A, the cells then are frozen to −80° C. at a rate of 1° per minute and stored in the vapor phase of a liquid nitrogen storage tank. Other methods of controlled freezing may be used as well as uncontrolled freezing immediately at −20° C. or in liquid nitrogen.

[0520] In certain aspects, cryopreserved cells are thawed and washed as described herein and allowed to rest for one hour at room temperature prior to activation using the methods of the present disclosure.

[0521] Also contemplated in the context of the invention is the collection of blood samples or apheresis product from a subject at a time period prior to when the expanded cells as described herein might be needed. As such, the source of the cells to be expanded can be collected at any time point necessary, and desired cells, such as T cells, isolated and frozen for later use in T cell therapy for any number of diseases or conditions that would benefit from T cell therapy, such as those described herein. In one aspect a blood sample or an apheresis is taken from a generally healthy subject. In certain aspects, a blood sample or an apheresis is taken from a generally healthy subject who is at risk of developing a disease, but who has not yet developed a disease, and the cells of interest are isolated and frozen for later use. In certain aspects, the T cells may be expanded, frozen, and used at a later time. In certain aspects, samples are collected from a patient shortly after diagnosis of a particular disease as described herein but prior to any treatments. In a further aspect, the cells are isolated from a blood sample or an apheresis from a subject prior to any number of relevant treatment modalities, including but not limited to treatment with agents such as natalizumab, efalizumab, antiviral agents, chemotherapy, radiation, immunosuppressive agents, such as cyclosporin, azathioprine, methotrexate, mycophenolate, and FK506, antibodies, or other immunoablative agents such as CAMPATH, anti-CD3 antibodies, cytoxan, fludarabine, cyclosporin, FK506, rapamycin, mycophenolic acid, steroids, FR901228, and irradiation.

[0522] In a further aspect of the present disclosure, T cells are obtained from a patient directly following treatment that leaves the subject with functional T cells. In this regard, it has been observed that following certain cancer treatments, in particular treatments with drugs that damage the immune system, shortly after treatment during the period when patients would normally be recovering from the treatment, the quality of T cells obtained may be optimal or improved for their ability to expand ex vivo Likewise, following ex vivo manipulation using the methods described herein, these cells may be in a preferred state for enhanced engraftment and in vivo expansion. Thus, it is contemplated within the context of the present disclosure to collect blood cells, including T cells, dendritic cells, or other cells of the hematopoietic lineage, during this recovery phase. Further, in certain aspects, mobilization (for example, mobilization with GM-CSF) and conditioning regimens can be used to create a condition in a subject wherein repopulation, recirculation, regeneration, and/or expansion of particular cell types is favored, especially during a defined window of time following therapy. Illustrative cell types include T cells, B cells, dendritic cells, and other cells of the immune system.

[0523] In one embodiment, a T cell population is diaglycerol kinase (DGK)-deficient. DGK-deficient cells include cells that do not express DGK RNA or protein, or have reduced or inhibited DGK activity. DGK-deficient cells can be generated by genetic approaches, e.g., administering RNA-interfering agents, e.g., siRNA, shRNA, miRNA, to reduce or prevent DGK expression. Alternatively, DGK-deficient cells can be generated by treatment with DGK inhibitors described herein.

[0524] In one embodiment, a T cell population is Ikaros-deficient. Ikaros-deficient cells include cells that do not express Ikaros RNA or protein, or have reduced or inhibited Ikaros activity, Ikaros-deficient cells can be generated by genetic approaches, e.g., administering RNA-interfering agents, e.g., siRNA, shRNA, miRNA, to reduce or prevent Ikaros expression. Alternatively, Ikaros-deficient cells can be generated by treatment with Ikaros inhibitors, e.g., lenalidomide.

[0525] In embodiments, a T cell population is DGK-deficient and Ikaros-deficient, e.g., does not express DGK and Ikaros, or has reduced or inhibited DGK and Ikaros activity. Such DGK and Ikaros-deficient cells can be generated by any of the methods described herein.

[0526] In an embodiment, the NK cells are obtained from the subject. In another embodiment, the NK cells are an NK cell line, e.g., NK-92 cell line (Conkwest).

### Allogeneic CAR Immune Effector Cells

[0527] In embodiments described herein, the immune effector cell can be an allogeneic immune effector cell, e.g., T cell or NK cell. For example, the cell can be an allogeneic T cell, e.g., an allogeneic T cell lacking expression of a functional T cell receptor (TCR) and/or human leukocyte antigen (HLA), e.g., HLA class I and/or HLA class II.

[0528] A T cell lacking a functional TCR can be, e.g., engineered such that it does not express any functional TCR on its surface, engineered such that it does not express one or more subunits that comprise a functional TCR or engineered such that it produces very little functional TCR on its surface. Alternatively, the T cell can express a substantially impaired TCR, e.g., by expression of mutated or truncated forms of one or more of the subunits of the TCR. The term “substantially impaired TCR” means that this TCR will not elicit an adverse immune reaction in a host.

[0529] A T cell described herein can be, e.g., engineered such that it does not express a functional HLA on its surface. For example, a T cell described herein, can be engineered such that cell surface expression HLA, e.g., HLA class I and/or HLA class II, is downregulated.

[0530] In some embodiments, the T cell can lack a functional TCR and a functional HLA, e.g., HLA class I and/or HLA class II.

[0531] Modified T cells that lack expression of a functional TCR and/or HLA can be obtained by any suitable means, including a knock out or knock down of one or more subunit of TCR or HLA. For example, the T cell can include a knock down of TCR and/or HLA using siRNA, shRNA, clustered regularly interspaced short palindromic repeats (CRISPR) transcription-activator like effector nuclease (TALEN), or zinc finger endonuclease (ZFN).

[0532] In some embodiments, the allogeneic cell can be a cell which does not expresses or expresses at low levels an inhibitory molecule, e.g. by any method described herein. For example, the cell can be a cell that does not express or expresses at low levels an inhibitory molecule, e.g., that can decrease the ability of a CAR-expressing cell to mount an immune effector response. Examples of inhibitory molecules include PD1, PD-L1, CTLA4, TIM3, LAG3, VISTA, BTLA, TIGIT, LAIR1, CD160, 2B4, CD80, CD86, B7-H3 (CD276), B7-H4 (VTCN1), HVEM (TNFRSF14 or CD270), KIR, A2aR, MHC class I, MHC class II, GAL9, adenosine, and TGF beta. Inhibition of an inhibitory molecule, e.g., by inhibition at the DNA, RNA or protein level, can optimize a CAR-expressing cell performance. In embodiments, an inhibitory nucleic acid, e.g., an inhibitory nucleic acid, e.g., a dsRNA, e.g., an siRNA or shRNA, a clustered regularly interspaced short palindromic repeats (CRISPR), a transcription-activator like effector nuclease (TALEN), or a zinc finger endonuclease (ZFN), e.g., as described herein, can be used.

siRNA and shRNA to Inhibit TCR or HLA

[0533] In some embodiments, TCR expression and/or HLA expression can be inhibited using siRNA or shRNA that targets a nucleic acid encoding a TCR and/or HLA, and/or an inhibitory molecule described herein (e.g., PD1, PD-L1, PD-L2, CTLA4, TIM3, CEACAM (e.g., CEACAM-1, CEACAM-3 and/or CEACAM-5), LAG3, VISTA, BTLA, TIGIT, LAIR1, CD160, 2B4, CD80, CD86, B7-H3 (CD276), B7-H4 (VTCN1), HVEM (TNFRSF14 or CD270), KIR, A2aR, MHC class I, MHC class II, GAL9, adenosine, and TGF beta), in a cell, e.g., T cell. Expression systems for siRNA and shRNAs, and exemplary shRNAs, are described, e.g., in paragraphs 649 and 650 of International Publication WO2015/142675, filed Mar. 13, 2015, which is incorporated by reference in its entirety.

### CRISPR to Inhibit TCR or HLA

[0534] “CRISPR” or “CRISPR to TCR and/or HLA” or “CRISPR to inhibit TCR and/or HLA” as used herein refers to a set of clustered regularly interspaced short palindromic repeats, or a system comprising such a set of repeats. “Cas”, as used herein, refers to a CRISPR-associated protein.

[0535] A “CRISPR/Cas” system refers to a system derived from CRISPR and Cas which can be used to silence or mutate a TCR and/or HLA gene, and/or an inhibitory molecule described herein (e.g., PD1, PD-L1, PD-L2, CTLA4, TIM3, CEACAM (e.g., CEACAM-1, CEACAM-3 and/or CEACAM-5), LAG3, VISTA, BTLA, TIGIT, LAIR1, CD160, 2B4, CD80, CD86, B7-H3 (CD276), B7-H4 (VTCN1), HVEM (TNFRSF14 or CD270), KIR, A2aR, MHC class I, MHC class II, GAL9, adenosine, and TGF beta), in a cell, e.g., T cell.

[0536] The CRISPR/Cas system, and uses thereof, are described, e.g., in paragraphs 651-658 of International Publication WO2015/142675, filed Mar. 13, 2015, which is incorporated by reference in its entirety.

TALEN to Inhibit TCR and/or HLA

[0537] TALEN″ or “TALEN to HLA and/or TCR” or “TALEN to inhibit HLA and/or TCR” refers to a transcription activator-like effector nuclease, an artificial nuclease which can be used to edit the HLA and/or TCR gene, and/or an inhibitory molecule described herein (e.g., PD1, PD-L1, PD-L2, CTLA4, TIM3, CEACAM (e.g., CEACAM-1, CEACAM-3 and/or CEACAM-5), LAG3, VISTA, BTLA, TIGIT, LAIR1, CD160, 2B4, CD80, CD86, B7-H3 (CD276), B7-H4 (VTCN1), HVEM (TNFRSF14 or CD270), KIR, A2aR, MHC class I, MHC class II, GAL9, adenosine, and TGF beta), in a cell, e.g., T cell.

[0538] TALENs, and uses thereof, are described, e.g., in paragraphs 659-665 of International Publication WO2015/142675, filed Mar. 13, 2015, which is incorporated by reference in its entirety.

Zinc Finger Nuclease to Inhibit HLA and/or TCR

[0539] “ZFN” or “Zinc Finger Nuclease” or “ZFN to HLA and/or TCR” or “ZFN to inhibit HLA and/or TCR” refer to a zinc finger nuclease, an artificial nuclease which can be used to edit the HLA and/or TCR gene, and/or an inhibitory molecule described herein (e.g., PD1, PD-L1, PD-L2, CTLA4, TIM3, CEACAM (e.g., CEACAM-1, CEACAM-3 and/or CEACAM-5), LAG3, VISTA, BTLA, TIGIT, LAIR1, CD160, 2B4, CD80, CD86, B7-H3 (CD276), B7-H4 (VTCN1), HVEM (TNFRSF14 or CD270), KIR, A2aR, MHC class I, MHC class II, GALS, adenosine, and TGF beta), in a cell, e.g., T cell.

[0540] ZFNs, and uses thereof, are described, e.g., in paragraphs 666-671 of International Publication WO2015/142675, filed Mar. 13, 2015, which is incorporated by reference in its entirety.

### Telomerase Expression

[0541] While not wishing to be bound by any particular theory, in some embodiments, a therapeutic T cell has short term persistence in a patient, due to shortened telomeres in the T cell; accordingly, transfection with a telomerase gene can lengthen the telomeres of the T cell and improve persistence of the T cell in the patient. See Carl June, “Adoptive T cell therapy for cancer in the clinic”, Journal of Clinical Investigation, 117:1466-1476 (2007). Thus, in an embodiment, an immune effector cell, e.g., a T cell, ectopically expresses a telomerase subunit, e.g., the catalytic subunit of telomerase, e.g., TERT, e.g., hTERT. In some aspects, this disclosure provides a method of producing a CAR-expressing cell, comprising contacting a cell with a nucleic acid encoding a telomerase subunit, e.g., the catalytic subunit of telomerase, e.g., TERT, e.g., hTERT. The cell may be contacted with the nucleic acid before, simultaneous with, or after being contacted with a construct encoding a CAR.

[0542] In one aspect, the disclosure features a method of making a population of immune effector cells (e.g., T cells, NK cells). In an embodiment, the method comprises: providing a population of immune effector cells (e.g., T cells or NK cells), contacting the population of immune effector cells with a nucleic acid encoding a CAR; and contacting the population of immune effector cells with a nucleic acid encoding a telomerase subunit, e.g., hTERT, under conditions that allow for CAR and telomerase expression. In an embodiment, the nucleic acid encoding the telomerase subunit is DNA. In an embodiment, the nucleic acid encoding the telomerase subunit comprises a promoter capable of driving expression of the telomerase subunit.

[0543] In an embodiment, hTERT has the amino acid sequence of GenBank Protein ID AAC51724.1 (Meyerson et al., “hEST2, the Putative Human Telomerase Catalytic Subunit Gene, Is Up-Regulated in Tumor Cells and during Immortalization” Cell Volume 90, Issue 4, 22 Aug. 1997, Pages 785-795) as provided in SEQ ID NO: 135.

[0544] In an embodiment, the hTERT has a sequence at least 80%, 85%, 90%, 95%, 96%, 97%, 98%, or 99% identical to the sequence of SEQ ID NO: 135. In an embodiment, the hTERT has a sequence of SEQ ID NO: 135. In an embodiment, the hTERT comprises a deletion (e.g., of no more than 5, 10, 15, 20, or 30 amino acids) at the N-terminus, the C-terminus, or both. In an embodiment, the hTERT comprises a transgenic amino acid sequence (e.g., of no more than 5, 10, 15, 20, or 30 amino acids) at the N-terminus, the C-terminus, or both.

[0545] In an embodiment, the hTERT is encoded by the nucleic acid sequence of GenBank Accession No. AF018167 (Meyerson et al., “hEST2, the Putative Human Telomerase Catalytic Subunit Gene, Is Up-Regulated in Tumor Cells and during Immortalization” Cell Volume 90, Issue 4, 22 August 1997, Pages 785-795) as provided in SEQ ID NO: 136

[0546] In an embodiment, the hTERT is encoded by a nucleic acid having a sequence at least 80%, 85%, 90%, 95%, 96, 97%, 98%, or 99% identical to the sequence of SEQ ID NO: 136. In an embodiment, the hTERT is encoded by a nucleic acid of SEQ ID NO: 136.

### Activation and Expansion of Immune Effector Cells (e.g., T Cells)

[0547] Immune effector cells, such as T cells, may be activated and expanded generally using methods as described, for example, in U.S. Pat. Nos. 6,352,694; 6,534,055; 6,905,680; 6,692,964; 5,858,358; 6,887,466; 6,905,681; 7,144,575; 7,067,318; 7,172,869; 7,232,566; 7,175,843; 5,883,223; 6,905,874; 6,797,514; 6,867,041; and U.S. Patent Application Publication No. 20060121005.

[0548] Generally, a population of immune effector cells, e.g., T cells may be expanded by contact with a surface having attached thereto an agent that stimulates a CD3/TCR complex associated signal and a ligand that stimulates a costimulatory molecule on the surface of the immune effector cells, e.g., T cells. In particular, T cell populations may be stimulated as described herein, such as by contact with an anti-CD3 antibody, or antigen-binding fragment thereof, or an anti-CD2 antibody immobilized on a surface, or by contact with a protein kinase C activator (e.g., bryostatin) in conjunction with a calcium ionophore. For co-stimulation of an accessory molecule on the surface of the T cells, a ligand that binds the accessory molecule is used. For example, a population of T cells can be contacted with an anti-CD3 antibody and an anti-CD28 antibody, under conditions appropriate for stimulating proliferation of the T cells. To stimulate proliferation of either CD4+ T cells or CD8+ T cells, an anti-CD3 antibody and an anti-CD28 antibody. Examples of an anti-CD28 antibody include 9.3, B-T3, XR-CD28 (Diaclone, Besancon, France) can be used as can other methods commonly known in the art (Berg et al., Transplant Proc. 30(8):3975-3977, 1998; Haanen et al., J. Exp. Med. 190(9):13191328, 1999; Garland et al., J. Immunol Meth. 227(1-2):53-63, 1999).

[0549] In certain aspects, the primary stimulatory signal and the costimulatory signal for the T cell may be provided by different protocols. For example, the agents providing each signal may be in solution or coupled to a surface. When coupled to a surface, the agents may be coupled to the same surface (i.e., in “cis” formation) or to separate surfaces (i.e., in “trans” formation). Alternatively, one agent may be coupled to a surface and the other agent in solution. In one aspect, the agent providing the costimulatory signal is bound to a cell surface and the agent providing the primary activation signal is in solution or coupled to a surface. In certain aspects, both agents can be in solution. In one aspect, the agents may be in soluble form, and then cross-linked to a surface, such as a cell expressing Fc receptors or an antibody or other binding agent which will bind to the agents. In this regard, see for example, U.S. Patent Application Publication Nos. 20040101519 and 20060034810 for artificial antigen presenting cells (aAPCs) that are contemplated for use in activating and expanding T cells in the present disclosure.

[0550] In one aspect, the two agents are immobilized on beads, either on the same bead, i.e., “cis,” or to separate beads, i.e., “trans.” By way of example, the agent providing the primary activation signal is an anti-CD3 antibody or an antigen-binding fragment thereof and the agent providing the costimulatory signal is an anti-CD28 antibody or antigen-binding fragment thereof; and both agents are co-immobilized to the same bead in equivalent molecular amounts. In one aspect, a 1:1 ratio of each antibody bound to the beads for CD4+ T cell expansion and T cell growth is used. In certain aspects of the present disclosure, a ratio of anti CD3:CD28 antibodies bound to the beads is used such that an increase in T cell expansion is observed as compared to the expansion observed using a ratio of 1:1. In one particular aspect an increase of from about 1 to about 3 fold is observed as compared to the expansion observed using a ratio of 1:1. In one aspect, the ratio of CD3:CD28 antibody bound to the beads ranges from 100:1 to 1:100 and all integer values there between. In one aspect of the present disclosure, more anti-CD28 antibody is bound to the particles than anti-CD3 antibody, i.e., the ratio of CD3:CD28 is less than one. In certain aspects of the invention, the ratio of anti CD28 antibody to anti CD3 antibody bound to the beads is greater than 2:1. In one particular aspect, a 1:100 CD3:CD28 ratio of antibody bound to beads is used. In one aspect, a 1:75 CD3:CD28 ratio of antibody bound to beads is used. In a further aspect, a 1:50 CD3:CD28 ratio of antibody bound to beads is used. In one aspect, a 1:30 CD3:CD28 ratio of antibody bound to beads is used. In one preferred aspect, a 1:10 CD3:CD28 ratio of antibody bound to beads is used. In one aspect, a 1:3 CD3:CD28 ratio of antibody bound to the beads is used. In yet one aspect, a 3:1 CD3:CD28 ratio of antibody bound to the beads is used.

[0551] Ratios of particles to cells from 1:500 to 500:1 and any integer values in between may be used to stimulate T cells or other target cells. As those of ordinary skill in the art can readily appreciate, the ratio of particles to cells may depend on particle size relative to the target cell. For example, small sized beads could only bind a few cells, while larger beads could bind many. In certain aspects the ratio of cells to particles ranges from 1:100 to 100:1 and any integer values in-between and in further aspects the ratio comprises 1:9 to 9:1 and any integer values in between, can also be used to stimulate T cells. The ratio of anti-CD3- and anti-CD28-coupled particles to T cells that result in T cell stimulation can vary as noted above, however certain preferred values include 1:100, 1:50, 1:40, 1:30, 1:20, 1:10, 1:9, 1:8, 1:7, 1:6, 1:5, 1:4, 1:3, 1:2, 1:1, 2:1, 3:1, 4:1, 5:1, 6:1, 7:1, 8:1, 9:1, 10:1, and 15:1 with one preferred ratio being at least 1:1 particles per T cell. In one aspect, a ratio of particles to cells of 1:1 or less is used. In one particular aspect, a preferred particle: cell ratio is 1:5. In further aspects, the ratio of particles to cells can be varied depending on the day of stimulation. For example, in one aspect, the ratio of particles to cells is from 1:1 to 10:1 on the first day and additional particles are added to the cells every day or every other day thereafter for up to 10 days, at final ratios of from 1:1 to 1:10 (based on cell counts on the day of addition). In one particular aspect, the ratio of particles to cells is 1:1 on the first day of stimulation and adjusted to 1:5 on the third and fifth days of stimulation. In one aspect, particles are added on a daily or every other day basis to a final ratio of 1:1 on the first day, and 1:5 on the third and fifth days of stimulation. In one aspect, the ratio of particles to cells is 2:1 on the first day of stimulation and adjusted to 1:10 on the third and fifth days of stimulation. In one aspect, particles are added on a daily or every other day basis to a final ratio of 1:1 on the first day, and 1:10 on the third and fifth days of stimulation. One of skill in the art will appreciate that a variety of other ratios may be suitable for use in the present disclosure. In particular, ratios will vary depending on particle size and on cell size and type. In one aspect, the most typical ratios for use are in the neighborhood of 1:1, 2:1 and 3:1 on the first day.

[0552] In further aspects of the present disclosure, the cells, such as T cells, are combined with agent-coated beads, the beads and the cells are subsequently separated, and then the cells are cultured. In an alternative aspect, prior to culture, the agent-coated beads and cells are not separated but are cultured together. In a further aspect, the beads and cells are first concentrated by application of a force, such as a magnetic force, resulting in increased ligation of cell surface markers, thereby inducing cell stimulation.

[0553] By way of example, cell surface proteins may be ligated by allowing paramagnetic beads to which anti-CD3 and anti-CD28 are attached (3×28 beads) to contact the T cells. In one aspect the cells (for example, 10⁴ to 10⁹ T cells) and beads (for example, DYNABEADS® M-450 CD3/CD28 T paramagnetic beads at a ratio of 1:1) are combined in a buffer, for example PBS (without divalent cations such as, calcium and magnesium). Again, those of ordinary skill in the art can readily appreciate any cell concentration may be used. For example, the target cell may be very rare in the sample and comprise only 0.01% of the sample or the entire sample (i.e., 100%) may comprise the target cell of interest. Accordingly, any cell number is within the context of the present disclosure. In certain aspects, it may be desirable to significantly decrease the volume in which particles and cells are mixed together (i.e., increase the concentration of cells), to ensure maximum contact of cells and particles. For example, in one aspect, a concentration of about 2 billion cells/ml is used. In one aspect, greater than 100 million cells/ml is used. In a further aspect, a concentration of cells of 10, 15, 20, 25, 30, 35, 40, 45, or 50 million cells/ml is used. In yet one aspect, a concentration of cells from 75, 80, 85, 90, 95, or 100 million cells/ml is used. In further aspects, concentrations of 125 or 150 million cells/ml can be used. Using high concentrations can result in increased cell yield, cell activation, and cell expansion. Further, use of high cell concentrations allows more efficient capture of cells that may weakly express target antigens of interest, such as CD28-negative T cells. Such populations of cells may have therapeutic value and would be desirable to obtain in certain aspects. For example, using high concentration of cells allows more efficient selection of CD8+ T cells that normally have weaker CD28 expression.

[0554] In one embodiment, cells transduced with a nucleic acid encoding a CAR, e.g., a CAR described herein, are expanded, e.g., by a method described herein. In one embodiment, the cells are expanded in culture for a period of several hours (e.g., about 2, 3, 4, 5, 6, 7, 8, 9, 10, 15, 18, 21 hours) to about 14 days (e.g., 1, 2, 3, 4, 5, 6, 7, 8, 9, 10, 11, 12, 13 or 14 days). In one embodiment, the cells are expanded for a period of 4 to 9 days. In one embodiment, the cells are expanded for a period of 8 days or less, e.g., 7, 6 or 5 days. In one embodiment, the cells, e.g., a CAR-expressing cell described herein, are expanded in culture for 5 days, and the resulting cells are more potent than the same cells expanded in culture for 9 days under the same culture conditions. Potency can be defined, e.g., by various T cell functions, e.g. proliferation, target cell killing, cytokine production, activation, migration, or combinations thereof. In one embodiment, the cells, e.g., a CAR-expressing cell described herein, expanded for 5 days show at least a one, two, three or four fold increase in cells doublings upon antigen stimulation as compared to the same cells expanded in culture for 9 days under the same culture conditions. In one embodiment, the cells, e.g., the cells expressing a CAR described herein, are expanded in culture for 5 days, and the resulting cells exhibit higher proinflammatory cytokine production, e.g., IFN-γ and/or GM-CSF levels, as compared to the same cells expanded in culture for 9 days under the same culture conditions. In one embodiment, the cells, e.g., a CAR-expressing cell described herein, expanded for 5 days show at least a one, two, three, four, five, tenfold or more increase in pg/ml of proinflammatory cytokine production, e.g., IFN-γ and/or GM-CSF levels, as compared to the same cells expanded in culture for 9 days under the same culture conditions.

[0555] In one aspect of the present disclosure, the mixture may be cultured for several hours (about 3 hours) to about 14 days or any hourly integer value in between. In one aspect, the mixture may be cultured for 21 days. In one aspect of the invention the beads and the T cells are cultured together for about eight days. In one aspect, the beads and T cells are cultured together for 2-3 days. Several cycles of stimulation may also be desired such that culture time of T cells can be 60 days or more. Conditions appropriate for T cell culture include an appropriate media (e.g., Minimal Essential Media or RPMI Media 1640 or, X-vivo 15, (Lonza)) that may contain factors necessary for proliferation and viability, including serum (e.g., fetal bovine or human serum), interleukin-2 (IL-2), insulin, IFN-γ, IL-4, IL-7, GM-CSF, IL-10, IL-12, IL-15, TGFβ, and TNF-α or any other additives for the growth of cells known to the skilled artisan. Other additives for the growth of cells include, but are not limited to, surfactant, plasmanate, and reducing agents such as N-acetyl-cysteine and 2-mercaptoethanol. Media can include RPMI 1640, AIM-V, DMEM, MEM, α-MEM, F-12, X-Vivo 15, and X-Vivo 20, Optimizer, with added amino acids, sodium pyruvate, and vitamins, either serum-free or supplemented with an appropriate amount of serum (or plasma) or a defined set of hormones, and/or an amount of cytokine(s) sufficient for the growth and expansion of T cells. Antibiotics, e.g., penicillin and streptomycin, are included only in experimental cultures, not in cultures of cells that are to be infused into a subject. The target cells are maintained under conditions necessary to support growth, for example, an appropriate temperature (e.g., 37° C.) and atmosphere (e.g., air plus 5% CO₂).

[0556] In one embodiment, the cells are expanded in an appropriate media (e.g., media described herein) that includes one or more interleukin that result in at least a 200-fold (e.g., 200-fold, 250-fold, 300-fold, 350-fold) increase in cells over a 14 day expansion period, e.g., as measured by a method described herein such as flow cytometry. In one embodiment, the cells are expanded in the presence IL-15 and/or IL-7 (e.g., IL-15 and IL-7).

[0557] In an embodiment, a method of expanding the cells (e.g., CAR-expressing cells, e.g., CD19 CAR-expressing cells, e.g., CD19 CAR-expressing cells described herein, e.g., CTL-019) described herein (e.g., ex vivo expansion) comprises contacting the cells with a PD-1 inhibitor, e.g., PD-1 inhibitor described herein, e.g., anti-PD-1 antibody molecule described herein, e.g., PDR-001.

[0558] In embodiments, methods described herein, e.g., CAR-expressing cell manufacturing methods, comprise removing T regulatory cells, e.g., CD25+ T cells, from a cell population, e.g., using an anti-CD25 antibody, or fragment thereof, or a CD25-binding ligand, IL-2. Methods of removing T regulatory cells, e.g., CD25+ T cells, from a cell population are described herein. In embodiments, the methods, e.g., manufacturing methods, further comprise contacting a cell population (e.g., a cell population in which T regulatory cells, such as CD25+ T cells, have been depleted; or a cell population that has previously contacted an anti-CD25 antibody, fragment thereof, or CD25-binding ligand) with IL-15 and/or IL-7. For example, the cell population (e.g., that has previously contacted an anti-CD25 antibody, fragment thereof, or CD25-binding ligand) is expanded in the presence of IL-15 and/or IL-7.

[0559] In an embodiment, methods described herein, e.g., CAR-expressing cell manufacturing methods, comprise contacting the cells (e.g., CAR-expressing cells, e.g., CD19 CAR-expressing cells, e.g., CD19 CAR-expressing cells described herein, e.g., CTL-019) with a PD-1 inhibitor, e.g., PD-1 inhibitor described herein, e.g., anti-PD-1 antibody molecule described herein, e.g., PDR-001.

[0560] In some embodiments a CAR-expressing cell described herein is contacted with a composition comprising a interleukin-15 (IL-15) polypeptide, a interleukin-15 receptor alpha (IL-15Ra) polypeptide, or a combination of both a IL-15 polypeptide and a IL-15Ra polypeptide e.g., hetIL-15, during the manufacturing of the CAR-expressing cell, e.g., ex vivo. In embodiments, a CAR-expressing cell described herein is contacted with a composition comprising a IL-15 polypeptide during the manufacturing of the CAR-expressing cell, e.g., ex vivo. In embodiments, a CAR-expressing cell described herein is contacted with a composition comprising a combination of both a IL-15 polypeptide and a IL-15 Ra polypeptide during the manufacturing of the CAR-expressing cell, e.g., ex vivo. In embodiments, a CAR-expressing cell described herein is contacted with a composition comprising hetIL-15 during the manufacturing of the CAR-expressing cell, e.g., ex vivo.

[0561] In one embodiment the CAR-expressing cell described herein is contacted with a composition comprising hetIL-15 during ex vivo expansion. In an embodiment, the CAR-expressing cell described herein is contacted with a composition comprising an IL-15 polypeptide during ex vivo expansion. In an embodiment, the CAR-expressing cell described herein is contacted with a composition comprising both an IL-15 polypeptide and an IL-15Ra polypeptide during ex vivo expansion. In one embodiment the contacting results in the survival and proliferation of a lymphocyte subpopulation, e.g., CD8+ T cells.

[0562] In one embodiment, the cells are cultured (e.g., expanded, simulated, and/or transduced) in media comprising serum. The serum may be, e.g., human AB serum (hAB). In some embodiments, the hAB serum is present at about 2%, about 5%, about 2-3%, about 3-4%, about 4-5%, or about 2-5%. 2% and 5% serum are each suitable levels that allow for many fold expansion of T cells. Furthermore, as shown in Smith et al., “Ex vivo expansion of human T cells for adoptive immunotherapy using the novel Xeno-free CTS Immune Cell Serum Replacement” Clinical & Translational Immunology (2015) 4, e31; doi:10.1038/cti.2014.31, medium containing 2% human AB serum is suitable for ex vivo expansion of T cells.

[0563] T cells that have been exposed to varied stimulation times may exhibit different characteristics. For example, typical blood or apheresed peripheral blood mononuclear cell products have a helper T cell population (TH, CD4+) that is greater than the cytotoxic or suppressor T cell population (TC, CD8+). Ex vivo expansion of T cells by stimulating CD3 and CD28 receptors produces a population of T cells that prior to about days 8-9 consists predominately of TH cells, while after about days 8-9, the population of T cells comprises an increasingly greater population of TC cells. Accordingly, depending on the purpose of treatment, infusing a subject with a T cell population comprising predominately of TH cells may be advantageous. Similarly, if an antigen-specific subset of TC cells has been isolated it may be beneficial to expand this subset to a greater degree.

[0564] Further, in addition to CD4 and CD8 markers, other phenotypic markers vary significantly, but in large part, reproducibly during the course of the cell expansion process. Thus, such reproducibility enables the ability to tailor an activated T cell product for specific purposes.

[0565] In some embodiments, cells transduced with a nucleic acid encoding a CAR, e.g., a CAR described herein, can be selected for administration based upon, e.g., protein expression levels of one or more of CCL20, GM-CSF, IFNγ, IL-10, IL-13, IL-17a, IL-2, IL-21, IL-4, IL-5, IL-6, IL-9, TNFα and/or combinations thereof. In some embodiments, cells transduced with a nucleic acid encoding a CAR, e.g., a CAR described herein, can be selected for administration based upon, e.g., protein expression levels of CCL20, IL-17a, IL-6 and combinations thereof.

[0566] Further, in addition to CD4 and CD8 markers, other phenotypic markers vary significantly, but in large part, reproducibly during the course of the cell expansion process. Thus, such reproducibility enables the ability to tailor an activated T cell product for specific purposes.

[0567] Once a CAR, e.g., CD19 CAR, is constructed, various assays can be used to evaluate the activity of the molecule, such as but not limited to, the ability to expand T cells following antigen stimulation, sustain T cell expansion in the absence of re-stimulation, and anti-cancer activities in appropriate in vitro and animal models. Assays to evaluate the effects of a CAR, e.g., CD19 CAR, are described, e.g., in paragraphs [0417]-[00423] of International Publication WO2015/090230, filed Dec. 19, 2014, which is incorporated by reference in its entirety.

### Populations of CAR Cells

[0568] In another aspect, the present invention provides a population of CAR-expressing cells, e.g., a population of CD19 CAR-expressing cells. In some embodiments, the population of CAR-expressing cells comprises a mixture of cells expressing different CARs.

[0569] For example, in one embodiment, the population of CAR-expressing cells can include a first cell expressing a CAR having an anti-CD19 binding domain described herein, and a second cell expressing a CAR having a different anti-CD19 binding domain, e.g., an anti-CD19 binding domain described herein that differs from the anti-CD19 binding domain in the CAR expressed by the first cell.

[0570] As another example, the population of CAR-expressing cells can include a first cell expressing a CAR that includes an anti-CD19 binding domain, e.g., as described herein, and a second cell expressing a CAR that includes an antigen binding domain to a target other than CD19 (e.g., a B cell antigen other than CD19, e.g., CD10, CD20, CD22, CD34, CD123, FLT-3, ROR1, CD79b, CD179b, or CD79a). In one embodiment, the population of CAR-expressing cells includes, e.g., a first cell expressing a CAR that includes a primary intracellular signaling domain, and a second cell expressing a CAR that includes a secondary signaling domain.

[0571] In one embodiment, the population of CAR-expressing cells can include a first cell expressing a CAR that includes an anti-CD19 binding domain and a second cell expressing a CAR that includes an antigen binding domain that targets, e.g., specifically binds, an antigen expressed on B cells, or a B cell antigen. In one embodiment, the B cell antigen is CD19, e.g., where the first cell and the second cell express different CD19 CARs. In another embodiment, the B cell antigen is an antigen other than CD19, e.g., CD10, CD20, CD22, CD34, CD123, FLT-3, ROR1, CD79b, CD179b, or CD79a.

[0572] In another aspect, the present invention provides a population of cells wherein at least one cell in the population expresses a CAR having an anti-CD19 binding domain described herein, and a second cell expressing another agent, e.g., an agent which enhances the activity or function of a CAR-expressing cell. For example, in one embodiment, the agent can be an agent which modulates or regulates, e.g., inhibits, T cell function. In some embodiments, the molecule that modulates or regulates T cell function is an inhibitory molecule, e.g., an agent described herein. Inhibitory molecules, e.g., can, in some embodiments, decrease the ability of a CAR-expressing cell to mount an immune effector response. Examples of inhibitory molecules include PD1, PD-L1, CTLA4, TIM3, LAG3, VISTA, BTLA, TIGIT, LAIR1, CD160, 2B4, CD80, CD86, B7-H3 (CD276), B7-H4 (VTCN1), HVEM (TNFRSF14 or CD270), KIR, A2aR, MHC class I, MHC class II, GAL9, adenosine, or TGF beta. In one embodiment, the agent which inhibits an inhibitory molecule comprises a first polypeptide, e.g., an inhibitory molecule, associated with a second polypeptide that provides a positive signal to the cell, e.g., an intracellular signaling domain described herein. In one embodiment, the agent comprises a first polypeptide, e.g., of an inhibitory molecule such as PD1, PD-L1, CTLA4, TIM3, LAG3, VISTA, BTLA, TIGIT, LAlR1, CD160, 2B4, CD80, CD86, B7-H3 (CD276), B7-H4 (VTCN1), HVEM (TNFRSF14 or CD270), KIR, A2aR, MHC class I, MHC class II, GAL9, adenosine, or TGF beta, or a fragment of any of these (e.g., at least a portion of an extracellular domain of any of these), and a second polypeptide which is an intracellular signaling domain described herein (e.g., comprising a costimulatory domain (e.g., 4-1BB, CD27, CD28, or ICOS, e.g., as described herein) and/or a primary signaling domain (e.g., a CD3 zeta signaling domain described herein). In one embodiment, the agent comprises a first polypeptide of PD1 or a fragment thereof (e.g., at least a portion of the extracellular domain of PD1), and a second polypeptide of an intracellular signaling domain described herein (e.g., a CD28 signaling domain described herein and/or a CD3 zeta signaling domain described herein).

[0573] In one aspect, the present invention provides methods comprising administering a population of CAR-expressing cells, e.g., CART cells, e.g., a mixture of cells expressing different CARs, in combination with another agent, e.g., a PD-1 inhibitor, such as a PD-1 inhibitor described herein. In another aspect, the present invention provides methods comprising administering a population of cells wherein at least one cell in the population expresses a CAR having an anti-CD19 binding domain as described herein, and a second cell expressing another agent, e.g., an agent which enhances the activity or fitness of a CAR-expressing cell, in combination with another agent, e.g., a PD-1 inhibitor, such as a PD-1 inhibitor described herein.

### PD-1 Inhibitors

[0574] The immune system has the capability of recognizing and eliminating tumor cells; however, tumors can use multiple strategies to evade immunity. Blockade of immune checkpoints is an approach to activating or reactivating therapeutic antitumor immunity. PD-1 is an exemplary immune checkpoint molecule.

[0575] PD-1 is a CD28/CTLA-4 family member expressed, e.g., on activated CD4⁺ and CD8⁺ T cells, T_{regs}, and B cells. See, e.g., Agata et al. 1996 Int. Immunol 8:765-75. PD-1 is an inhibitory member of the CD28 family of receptors that also includes CD28, CTLA-4, ICOS, and BTLA. PD-1 negatively regulates effector T cell signaling and function. PD-1 is induced on tumor-infiltrating T cells, and can result in functional exhaustion or dysfunction (Keir et al. (2008) Annu. Rev. Immunol. 26:677-704; Pardoll et al. (2012) Nat Rev Cancer 12(4):252-64). PD-1 delivers a coinhibitory signal upon binding to either of its two ligands, Programmed Death-Ligand 1 (PD-L1) or Programmed Death-Ligand 2 (PD-L2). PD-L1 and PD-L2 have been shown to downregulate T cell activation upon binding to PD-1 (Freeman et a. 2000 J Exp Med 192:1027-34; Latchman et al. 2001 Nat Immunol 2:261-8; Carter et al. 2002 Eur J Immunol 32:634-43). PD-L1 is expressed on a number of cell types, including T cells, natural killer (NK) cells, macrophages, dendritic cells (DCs), B cells, epithelial cells, vascular endothelial cells, as well as many types of tumors. PD-L1 is abundant in human cancers (Dong et al. 2003 J Mol Med 81:281-7; Blank et al. 2005 Cancer Immunol. Immunother 54:307-314; Konishi et al. 2004 Clin Cancer Res 10:5094), and high expression of PD-L1 on murine and human tumors has been linked to poor clinical outcomes in a variety of cancers (Keir et al. (2008) Annu. Rev. Immunol. 26:677-704; Pardoll et al. (2012) Nat Rev Cancer 12(4):252-64). PD-L2 is expressed on dendritic cells, macrophages, and some tumors. Blockade of the PD-1 pathway has been pre-clinically and clinically validated for cancer immunotherapy. Immune suppression can be reversed by inhibiting the local interaction of PD-1 with PD-L1. Both preclinical and clinical studies have demonstrated that anti-PD-1 blockade can restore activity of effector T cells and results in robust anti-tumor response. For example, blockade of PD-1 pathway can restore exhausted/dysfunctional effector T cell function (e.g., proliferation, IFN-γ secretion, or cytolytic function) and/or inhibit T_{reg} cell function (Keir et al. (2008) Annu. Rev. Immunol. 26:677-704; Pardoll et al. (2012) Nat Rev Cancer 12(4):252-64). Blockade of the PD-1 pathway can be affected with an antibody, an antigen binding fragment thereof, an immunoadhesin, a fusion protein, or oligopeptide of PD-1, PD-L1 and/or PD-L2.

### Antibody Molecules to PD-1

[0576] In one embodiment, the PD-1 inhibitor is an anti-PD-1 antibody molecule as described in US 2015/0210769, published on July 30, 2015, entitled “Antibody Molecules to PD-1 and Uses Thereof,” incorporated by reference in its entirety.

[0577] In some embodiments, the anti-PD-1 antibody molecule (e.g., an isolated or recombinant antibody molecule) has one or more of the following properties:

[0578] (i) binds to PD-1, e.g., human PD-1, with high affinity, e.g., with an affinity constant of at least about 10⁷ M⁻¹, typically about 10⁸ M⁻¹, and more typically, about 10⁹ M⁻¹ to 10¹⁰ M⁻¹ or stronger;

[0579] (ii) does not substantially bind to CD28, CTLA-4, ICOS or BTLA;

[0580] (iii) inhibits or reduces binding of PD-1 to a PD-1 ligand, e.g., PD-L1 or PD-L2, or both;

[0581] (iv) binds specifically to an epitope on PD-1, e.g., the same or similar epitope as the epitope recognized by murine monoclonal antibody BAP049 or a chimeric antibody BAP049, e.g., BAP049-chi or BAP049-chi-Y;

[0582] (v) shows the same or similar binding affinity or specificity, or both, as any of BAP049-hum01, BAP049-hum02, BAP049-hum03, BAP049-hum04, BAP049-hum05, BAP049-hum06, BAP049-hum07, BAP049-hum08, BAP049-hum09, BAP049-hum10, BAP049-hum11, BAP049-hum12, BAP049-hum13, BAP049-hum14, BAP049-hum15, BAP049-hum16, BAP049-Clone-A, BAP049-Clone-B, BAP049-Clone-C, BAP049-Clone-D, or BAP049-Clone-E;

[0583] (vi) shows the same or similar binding affinity or specificity, or both, as an antibody molecule (e.g., an heavy chain variable region and light chain variable region) described in Table 6;

[0584] (vii) shows the same or similar binding affinity or specificity, or both, as an antibody molecule (e.g., an heavy chain variable region and light chain variable region) having an amino acid sequence shown in Table 6;

[0585] (viii) shows the same or similar binding affinity or specificity, or both, as an antibody molecule (e.g., an heavy chain variable region and light chain variable region) encoded by the nucleotide sequence shown in Table 6;

[0586] (ix) inhibits, e.g., competitively inhibits, the binding of a second antibody molecule to PD-1, wherein the second antibody molecule is an antibody molecule described herein, e.g., an antibody molecule chosen from, e.g., any of BAP049-hum01, BAP049-hum02, BAP049-hum03, BAP049-hum04, BAP049-hum05, BAP049-hum06, BAP049-hum07, BAP049-hum08, BAP049-hum09, BAP049-hum10, BAP049-hum11, BAP049-hum12, BAP049-hum13, BAP049-hum14, BAP049-hum15, BAP049-hum16, BAP049-Clone-A, BAP049-Clone-B, BAP049-Clone-C, BAP049-Clone-D, or BAP049-Clone-E;

[0587] (x) binds the same or an overlapping epitope with a second antibody molecule to PD-1, wherein the second antibody molecule is an antibody molecule described herein, e.g., an antibody molecule chosen from, e.g., any of BAP049-hum01, BAP049-hum02, BAP049-hum03, BAP049-hum04, BAP049-hum05, BAP049-hum06, BAP049-hum07, BAP049-hum08, BAP049-hum09, BAP049-hum10, BAP049-hum11, BAP049-hum12, BAP049-hum13, BAP049-hum14, BAP049-hum15, BAP049-hum16, BAP049-Clone-A, BAP049-Clone-B, BAP049-Clone-C, BAP049-Clone-D, or BAP049-Clone-E;

[0588] (xi) competes for binding, and/or binds the same epitope, with a second antibody molecule to PD-1, wherein the second antibody molecule is an antibody molecule described herein, e.g., an antibody molecule chosen from, e.g., any of BAP049-hum01, BAP049-hum02, BAP049-hum03, BAP049-hum04, BAP049-hum05, BAP049-hum06, BAP049-hum07, BAP049-hum08, BAP049-hum09, BAP049-hum10, BAP049-hum11, BAP049-hum12, BAP049-hum13, BAP049-hum14, BAP049-hum15, BAP049-hum16, BAP049-Clone-A, BAP049-Clone-B, BAP049-Clone-C, BAP049-Clone-D, or BAP049-Clone-E;

[0589] (xii) has one or more biological properties of an antibody molecule described herein, e.g., an antibody molecule chosen from, e.g., any of BAP049-hum01, BAP049-hum02, BAP049-hum03, BAP049-hum04, BAP049-hum05, BAP049-hum06, BAP049-hum07, BAP049-hum08, BAP049-hum09, BAP049-hum10, BAP049-hum11, BAP049-hum12, BAP049-hum13, BAP049-hum14, BAP049-hum15, BAP049-hum16, BAP049-Clone-A, BAP049-Clone-B, BAP049-Clone-C, BAP049-Clone-D, or BAP049-Clone-E;

[0590] (xiii) has one or more pharmacokinetic properties of an antibody molecule described herein, e.g., an antibody molecule chosen from, e.g., any of BAP049-hum01, BAP049-hum02, BAP049-hum03, BAP049-hum04, BAP049-hum05, BAP049-hum06, BAP049-hum07, BAP049-hum08, BAP049-hum09, BAP049-hum10, BAP049-hum11, BAP049-hum12, BAP049-hum13, BAP049-hum14, BAP049-hum15, BAP049-hum16, BAP049-Clone-A, BAP049-Clone-B, BAP049-Clone-C, BAP049-Clone-D, or BAP049-Clone-E;

[0591] (xiv) inhibits one or more activities of PD-1, e.g., results in one or more of: an increase in tumor infiltrating lymphocytes, an increase in T-cell receptor mediated proliferation, or a decrease in immune evasion by cancerous cells;

[0592] (xv) binds human PD-1 and is cross-reactive with cynomolgus PD-1;

[0593] (xvi) binds to one or more residues within the C strand, CC′ loop, C′ strand, or FG loop of PD-1, or a combination two, three or all of the C strand, CC′ loop, C′ strand or FG loop of PD-1, e.g., wherein the binding is assayed using ELISA or Biacore; or

[0594] (xvii) has a VL region that contributes more to binding to PD-1 than a VH region.

[0595] In some embodiments, the antibody molecule binds to PD-1 with high affinity, e.g., with a K_{D} that is about the same, or at least about 10%, 20%, 30%, 40%, 50%, 60%, 70%, 80% or 90% higher or lower than the K_{D} of a murine or chimeric anti-PD-1 antibody molecule, e.g., a murine or chimeric anti-PD-1 antibody molecule described herein. In some embodiments, the K_{D} of the murine or chimeric anti-PD-1 antibody molecule is less than about 0.4, 0.3, 0.2, 0.1, or 0.05 nM, e.g., measured by a Biacore method. In some embodiments, the K_{D} of the murine or chimeric anti-PD-1 antibody molecule is less than about 0.2 nM, e.g., about 0.135 nM. In other embodiments, the K_{D} of the murine or chimeric anti PD-1 antibody molecule is less than about 10, 5, 3, 2, or 1 nM, e.g., measured by binding on cells expressing PD-1 (e.g., 300.19 cells). In some embodiments, the K_{D} of the murine or chimeric anti PD-1 antibody molecule is less than about 5 nM, e.g., about 4.60 nM (or about 0.69 μg/mL).

[0596] In some embodiments, the anti-PD-1 antibody molecule binds to PD-1 with a K_{off} slower than 1×10⁴, 5×10⁻⁵, or 1×10⁻⁵ S⁻¹, e.g., about 1.65×10⁻⁵ s⁻¹. In some embodiments, the anti-PD-1 antibody molecule binds to PD-1 with a Kₒₙ faster than 1×10⁴, 5×10⁴, 1×10⁵, or 5×10⁵ M⁻¹s⁻¹, e.g., about 1.23×10⁵ M⁻¹s⁻¹.

[0597] In some embodiments, the expression level of the antibody molecule is higher, e.g., at least about 0.5, 1, 2, 3, 4, 5, 6, 7, 8, 9 or 10-fold higher, than the expression level of a murine or chimeric antibody molecule, e.g., a murine or chimeric anti-PD-1 antibody molecule described herein. In some embodiments, the antibody molecule is expressed in CHO cells.

[0598] In some embodiments, the anti-PD-1 antibody molecule reduces one or more PD-1-associated activities with an IC₅₀ (concentration at 50% inhibition) that is about the same or lower, e.g., at least about 10%, 20%, 30%, 40%, 50%, 60%, 70%, 80% or 90% lower, than the

[0599] IC₅₀ of a murine or chimeric anti-PD-1 antibody molecule, e.g., a murine or chimeric anti-PD-1 antibody molecule described herein. In some embodiments, the IC₅₀ of the murine or chimeric anti-PD-1 antibody molecule is less than about 6, 5, 4, 3, 2, or 1 nM, e.g., measured by binding on cells expressing PD-1 (e.g., 300.19 cells). In some embodiments, the IC₅₀ of the murine or chimeric anti-PD-1 antibody molecule is less than about 4 nM, e.g., about 3.40 nM (or about 0.51 μg/mL). In some embodiments, the PD-1-associated activity reduced is the binding of PD-L1 and/or PD-L2 to PD-1. In some embodiments, the anti-PD-1 antibody molecule binds to peripheral blood mononucleated cells (PBMCs) activated by Staphylococcal enterotoxin B (SEB). In other embodiments, the anti-PD-1 antibody molecule increases the expression of IL-2 on whole blood activated by SEB. For example, the anti-PD-1 antibody increases the expression of IL-2 by at least about 2, 3, 4, or 5-fold, compared to the expression of IL-2 when an isotype control (e.g., IgG4) is used.

[0600] In some embodiments, the anti-PD-1 antibody molecule has improved stability, e.g., at least about 0.5, 1, 2, 3, 4, 5, 6, 7, 8, 9 or 10-fold more stable in vivo or in vitro, than a murine or chimeric anti-PD-1 antibody molecule, e.g., a murine or chimeric anti-PD-1 antibody molecule described herein.

[0601] In one embodiment, the anti-PD-1 antibody molecule is a humanized antibody molecule and has a risk score based on T cell epitope analysis of 300 to 700, 400 to 650, 450 to 600, or a risk score as described herein.

[0602] In another embodiment, the anti-PD-1 antibody molecule comprises at least one antigen-binding region, e.g., a variable region or an antigen-binding fragment thereof, from an antibody described herein, e.g., an antibody chosen from any of BAP049-hum01, BAP049-hum02, BAP049-hum03, BAP049-hum04, BAP049-hum05, BAP049-hum06, BAP049-hum07, BAP049-hum08, BAP049-hum09, BAP049-hum10, BAP049-hum11, BAP049-hum12, BAP049-hum13, BAP049-hum14, BAP049-hum15, BAP049-hum16, BAP049-Clone-A, BAP049-Clone-B, BAP049-Clone-C, BAP049-Clone-D, or BAP049-Clone-E; or as described in Table 6, or encoded by the nucleotide sequence in Table 6; or a sequence substantially identical (e.g., at least 80%, 85%, 90%, 92%, 95%, 97%, 98%, 99% or higher identical) to any of the aforesaid sequences.

[0603] In yet another embodiment, the anti-PD-1 antibody molecule comprises at least one, two, three or four variable regions from an antibody described herein, e.g., an antibody chosen from any of BAP049-hum01, BAP049-hum02, BAP049-hum03, BAP049-hum04, BAP049-hum05, BAP049-hum06, BAP049-hum07, BAP049-hum08, BAP049-hum09, BAP049-hum10, BAP049-hum11, BAP049-hum12, BAP049-hum13, BAP049-hum14, BAP049-hum15, BAP049-hum16, BAP049-Clone-A, BAP049-Clone-B, BAP049-Clone-C, BAP049-Clone-D, or BAP049-Clone-E; or as described in Table 6, or encoded by the nucleotide sequence in Table 6; or a sequence substantially identical (e.g., at least 80%, 85%, 90%, 92%, 95%, 97%, 98%, 99% or higher identical) to any of the aforesaid sequences.

[0604] In yet another embodiment, the anti-PD-1 antibody molecule comprises at least one or two heavy chain variable regions from an antibody described herein, e.g., an antibody chosen from any of BAP049-hum01, BAP049-hum02, BAP049-hum03, BAP049-hum04, BAP049-hum05, BAP049-hum06, BAP049-hum07, BAP049-hum08, BAP049-hum09, BAP049-hum10, BAP049-hum11, BAP049-hum12, BAP049-hum13, BAP049-hum14, BAP049-hum15, BAP049-hum16, BAP049-Clone-A, BAP049-Clone-B, BAP049-Clone-C, BAP049-Clone-D, or BAP049-Clone-E; or as described in Table 6, or encoded by the nucleotide sequence in Table 6; or a sequence substantially identical (e.g., at least 80%, 85%, 90%, 92%, 95%, 97%, 98%, 99% or higher identical) to any of the aforesaid sequences.

[0605] In yet another embodiment, the anti-PD-1 antibody molecule comprises at least one or two light chain variable regions from an antibody described herein, e.g., an antibody chosen from any of BAP049-hum01, BAP049-hum02, BAP049-hum03, BAP049-hum04, BAP049-hum05, BAP049-hum06, BAP049-hum07, BAP049-hum08, BAP049-hum09, BAP049-hum10, BAP049-hum11, BAP049-hum12, BAP049-hum13, BAP049-hum14, BAP049-hum15, BAP049-hum16, BAP049-Clone-A, BAP049-Clone-B, BAP049-Clone-C, BAP049-Clone-D, or BAP049-Clone-E; or as described in Table 6, or encoded by the nucleotide sequence in Table 6; or a sequence substantially identical (e.g., at least 80%, 85%, 90%, 92%, 95%, 97%, 98%, 99% or higher identical) to any of the aforesaid sequences.

[0606] In yet another embodiment, the anti-PD-1 antibody molecule includes a heavy chain constant region for an IgG4, e.g., a human IgG4. In one embodiment, the human IgG4 includes a substitution at position 228 according to EU numbering (e.g., a Ser to Pro substitution). In still another embodiment, the anti-PD-1 antibody molecule includes a heavy chain constant region for an IgG1, e.g., a human IgG1. In one embodiment, the human IgG1 includes a substitution at position 297 according to EU numbering (e.g., an Asn to Ala substitution). In one embodiment, the human IgG1 includes a substitution at position 265 according to EU numbering, a substitution at position 329 according to EU numbering, or both (e.g., an Asp to Ala substitution at position 265 and/or a Pro to Ala substitution at position 329). In one embodiment, the human IgG1 includes a substitution at position 234 according to EU numbering, a substitution at position 235 according to EU numbering, or both (e.g., a Leu to Ala substitution at position 234 and/or a Leu to Ala substitution at position 235). In one embodiment, the heavy chain constant region comprises an amino sequence set forth in Table 3, or a sequence substantially identical (e.g., at least 80%, 85%, 90%, 92%, 95%, 97%, 98%, 99% or higher identical) thereto.

[0607] In yet another embodiment, the anti-PD-1 antibody molecule includes a kappa light chain constant region, e.g., a human kappa light chain constant region. In one embodiment, the light chain constant region comprises an amino sequence set forth in Table 3 of US 2015/0210769A1, or a sequence substantially identical (e.g., at least 80%, 85%, 90%, 92%, 95%, 97%, 98%, 99% or higher identical) thereto.

[0608] In another embodiment, the anti-PD-1 antibody molecule includes a heavy chain constant region for an IgG4, e.g., a human IgG4, and a kappa light chain constant region, e.g., a human kappa light chain constant region, e.g., a heavy and light chain constant region comprising an amino sequence set forth in Table 3 of US 2015/0210769A1, or a sequence substantially identical (e.g., at least 80%, 85%, 90%, 92%, 95%, 97%, 98%, 99% or higher identical) thereto. In one embodiment, the human IgG4 includes a substitution at position 228 according to EU numbering (e.g., a Ser to Pro substitution). In yet another embodiment, the anti-PD-1 antibody molecule includes a heavy chain constant region for an IgG1, e.g., a human IgG1, and a kappa light chain constant region, e.g., a human kappa light chain constant region, e.g., a heavy and light chain constant region comprising an amino sequence set forth in Table 3 of US 2015/0210769A1, or a sequence substantially identical (e.g., at least 80%, 85%, 90%, 92%, 95%, 97%, 98%, 99% or higher identical) thereto. In one embodiment, the human IgG1 includes a substitution at position 297 according to EU numbering (e.g., an Asn to Ala substitution). In one embodiment, the human IgG1 includes a substitution at position 265 according to EU numbering, a substitution at position 329 according to EU numbering, or both (e.g., an Asp to Ala substitution at position 265 and/or a Pro to Ala substitution at position 329). In one embodiment, the human IgG1 includes a substitution at position 234 according to EU numbering, a substitution at position 235 according to EU numbering, or both (e.g., a Leu to Ala substitution at position 234 and/or a Leu to Ala substitution at position 235).

[0609] In another embodiment, the anti-PD-1 antibody molecule includes a heavy chain variable domain and a constant region, a light chain variable domain and a constant region, or both, comprising the amino acid sequence of BAP049-Clone-A, BAP049-Clone-B, BAP049-Clone-C, BAP049-Clone-D, or BAP049-Clone-E; or as described in Table 6, or encoded by the nucleotide sequence in Table 6; or a sequence substantially identical (e.g., at least 80%, 85%, 90%, 92%, 95%, 97%, 98%, 99% or higher identical) to any of the aforesaid sequences. The anti-PD-1 antibody molecule, optionally, comprises a leader sequence from a heavy chain, a light chain, or both, as showin in Table 4 of US 2015/0210769A1; or a sequence substantially identical thereto.

[0610] In yet another embodiment, the anti-PD-1 antibody molecule includes at least one, two, or three complementarity determining regions (CDRs) from a heavy chain variable region of an antibody described herein, e.g., an antibody chosen from any of BAP049-hum01, BAP049-hum02, BAP049-hum03, BAP049-hum04, BAP049-hum05, BAP049-hum06, BAP049-hum07, BAP049-hum08, BAP049-hum09, BAP049-hum10, BAP049-hum11, BAP049-hum12, BAP049-hum13, BAP049-hum14, BAP049-hum15, BAP049-hum16, BAP049-Clone-A, BAP049-Clone-B, BAP049-Clone-C, BAP049-Clone-D, or BAP049-Clone-E; or as described in Table 6, or encoded by the nucleotide sequence in Table 6; or a sequence substantially identical (e.g., at least 80%, 85%, 90%, 92%, 95%, 97%, 98%, 99% or higher identical) to any of the aforesaid sequences.

[0611] In yet another embodiment, the anti-PD-1 antibody molecule includes at least one, two, or three CDRs (or collectively all of the CDRs) from a heavy chain variable region comprising an amino acid sequence shown in Table 6, or encoded by a nucleotide sequence shown in Table 6. In one embodiment, one or more of the CDRs (or collectively all of the CDRs) have one, two, three, four, five, six or more changes, e.g., amino acid substitutions or deletions, relative to the amino acid sequence shown in Table 6, or encoded by a nucleotide sequence shown in Table 6.

[0612] In yet another embodiment, the anti-PD-1 antibody molecule includes at least one, two, or three CDRs from a light chain variable region of an antibody described herein, e.g., an antibody chosen from any of BAP049-hum01, BAP049-hum02, BAP049-hum03, BAP049-hum04, BAP049-hum05, BAP049-hum06, BAP049-hum07, BAP049-hum08, BAP049-hum09, BAP049-hum10, BAP049-hum11, BAP049-hum12, BAP049-hum13, BAP049-hum14, BAP049-hum15, BAP049-hum16, BAP049-Clone-A, BAP049-Clone-B, BAP049-Clone-C, BAP049-Clone-D, or BAP049-Clone-E; or as described in Table 6, or encoded by the nucleotide sequence in Table 6; or a sequence substantially identical (e.g., at least 80%, 85%, 90%, 92%, 95%, 97%, 98%, 99% or higher identical) to any of the aforesaid sequence.

[0613] In yet another embodiment, the anti-PD-1 antibody molecule includes at least one, two, or three CDRs (or collectively all of the CDRs) from a light chain variable region comprising an amino acid sequence shown in Table 6, or encoded by a nucleotide sequence shown in Table 6. In one embodiment, one or more of the CDRs (or collectively all of the CDRs) have one, two, three, four, five, six or more changes, e.g., amino acid substitutions or deletions, relative to the amino acid sequence shown in Table 6, or encoded by a nucleotide sequence shown in Table 6. In certain embodiments, the anti-PD-1 antibody molecule includes a substitution in a light chain CDR, e.g., one or more substitutions in a CDR1, CDR2 and/or CDR3 of the light chain. In one embodiment, the anti-PD-1 antibody molecule includes a substitution in the light chain CDR3 at position 102 of the light variable region, e.g., a substitution of a cysteine to tyrosine, or a cysteine to serine residue, at position 102 of the light variable region according to Table 6 (e.g., SEQ ID NO: 152 or 162 for murine or chimeric, unmodified; or any of SEQ ID NOs: 168, 176, 180, 188, 192, 196, 200, 204, 208, or 212 for a modified sequence).

[0614] In another embodiment, the anti-PD-1 antibody molecule includes at least one, two, three, four, five or six CDRs (or collectively all of the CDRs) from a heavy and light chain variable region comprising an amino acid sequence shown in Table 6, or encoded by a nucleotide sequence shown in Table 6. In one embodiment, one or more of the CDRs (or collectively all of the CDRs) have one, two, three, four, five, six or more changes, e.g., amino acid substitutions or deletions, relative to the amino acid sequence shown in Table 6, or encoded by a nucleotide sequence shown in Table 6.

[0615] In one embodiment, the anti-PD-1 antibody molecule includes all six CDRs from an antibody described herein, e.g., an antibody chosen from any of BAP049-hum01, BAP049-hum02, BAP049-hum03, BAP049-hum04, BAP049-hum05, BAP049-hum06, BAP049-hum07, BAP049-hum08, BAP049-hum09, BAP049-hum10, BAP049-hum11, BAP049-hum12, BAP049-hum13, BAP049-hum14, BAP049-hum15, BAP049-hum16, BAP049-Clone-A, BAP049-Clone-B, BAP049-Clone-C, BAP049-Clone-D, or BAP049-Clone-E; or as described in Table 6, or encoded by the nucleotide sequence in Table 6, or closely related CDRs, e.g., CDRs which are identical or which have at least one amino acid alteration, but not more than two, three or four alterations (e.g., substitutions, deletions, or insertions, e.g., conservative substitutions). In one embodiment, the anti-PD-1 antibody molecule may include any CDR described herein. In certain embodiments, the anti-PD-1 antibody molecule includes a substitution in a light chain CDR, e.g., one or more substitutions in a CDR1, CDR2 and/or CDR3 of the light chain. In one embodiment, the anti-PD-1 antibody molecule includes a substitution in the light chain CDR3 at position 102 of the light variable region, e.g., a substitution of a cysteine to tyrosine, or a cysteine to serine residue, at position 102 of the light variable region according to Table 6 (e.g., SEQ ID NO: 152 or 162 for murine or chimeric, unmodified; or any of SEQ ID NOs: 168, 176, 180, 188, 192, 196, 200, 204, 208, or 212 for a modified sequence).

[0616] In another embodiment, the anti-PD-1 antibody molecule includes at least one, two, or three CDRs according to Kabat et al. (e.g., at least one, two, or three CDRs according to the Kabat definition as set out in Table 6) from a heavy chain variable region of an antibody described herein, e.g., an antibody chosen from any of BAP049-hum01, BAP049-hum02, BAP049-hum03, BAP049-hum04, BAP049-hum05, BAP049-hum06, BAP049-hum07, BAP049-hum08, BAP049-hum09, BAP049-hum10, BAP049-hum11, BAP049-hum12, BAP049-hum13, BAP049-hum14, BAP049-hum15, BAP049-hum16, BAP049-Clone-A, BAP049-Clone-B, BAP049-Clone-C, BAP049-Clone-D, or BAP049-Clone-E; or as described in Table 6, or encoded by the nucleotide sequence in Table 6; or a sequence substantially identical (e.g., at least 80%, 85%, 90%, 92%, 95%, 97%, 98%, 99% or higher identical) to any of the aforesaid sequences; or which have at least one amino acid alteration, but not more than two, three or four alterations (e.g., substitutions, deletions, or insertions, e.g., conservative substitutions) relative to one, two, or three CDRs according to Kabat et al. shown in Table 6.

[0617] In another embodiment, the anti-PD-1 antibody molecule includes at least one, two, or three CDRs according to Kabat et al. (e.g., at least one, two, or three CDRs according to the Kabat definition as set out in Table 6) from a light chain variable region of an antibody described herein, e.g., an antibody chosen from any of BAP049-hum01, BAP049-hum02, BAP049-hum03, BAP049-hum04, BAP049-hum05, BAP049-hum06, BAP049-hum07, BAP049-hum08, BAP049-hum09, BAP049-hum10, BAP049-hum11, BAP049-hum12, BAP049-hum13, BAP049-hum14, BAP049-hum15, BAP049-hum16, BAP049-Clone-A, BAP049-Clone-B, BAP049-Clone-C, BAP049-Clone-D, or BAP049-Clone-E; or as described in Table 6, or encoded by the nucleotide sequence in Table 6; or a sequence substantially identical (e.g., at least 80%, 85%, 90%, 92%, 95%, 97%, 98%, 99% or higher identical) to any of the aforesaid sequences; or which have at least one amino acid alteration, but not more than two, three or four alterations (e.g., substitutions, deletions, or insertions, e.g., conservative substitutions) relative to one, two, or three CDRs according to Kabat et al. shown in Table 6.

[0618] In yet another embodiment, the anti-PD-1 antibody molecule includes at least one, two, three, four, five, or six CDRs according to Kabat et al. (e.g., at least one, two, three, four, five, or six CDRs according to the Kabat definition as set out in Table 6) from the heavy and light chain variable regions of an antibody described herein, e.g., an antibody chosen from any of BAP049-hum01, BAP049-hum02, BAP049-hum03, BAP049-hum04, BAP049-hum05, BAP049-hum06, BAP049-hum07, BAP049-hum08, BAP049-hum09, BAP049-hum10, BAP049-hum11, BAP049-hum12, BAP049-hum13, BAP049-hum14, BAP049-hum15, BAP049-hum16, BAP049-Clone-A, BAP049-Clone-B, BAP049-Clone-C, BAP049-Clone-D, or BAP049-Clone-E; or as described in Table 6, or encoded by the nucleotide sequence in Table 6; or a sequence substantially identical (e.g., at least 80%, 85%, 90%, 92%, 95%, 97%, 98%, 99% or higher identical) to any of the aforesaid sequences; or which have at least one amino acid alteration, but not more than two, three or four alterations (e.g., substitutions, deletions, or insertions, e.g., conservative substitutions) relative to one, two, three, four, five, or six CDRs according to Kabat et al. shown in Table 6.

[0619] In yet another embodiment, the anti-PD-1 antibody molecule includes all six CDRs according to Kabat et al. (e.g., all six CDRs according to the Kabat definition as set out in Table 6) from the heavy and light chain variable regions of an antibody described herein, e.g., an antibody chosen from any of BAP049-hum01, BAP049-hum02, BAP049-hum03, BAP049-hum04, BAP049-hum05, BAP049-hum06, BAP049-hum07, BAP049-hum08, BAP049-hum09, BAP049-hum10, BAP049-hum11, BAP049-hum12, BAP049-hum13, BAP049-hum14, BAP049-hum15, BAP049-hum16, BAP049-Clone-A, BAP049-Clone-B, BAP049-Clone-C, BAP049-Clone-D, or BAP049-Clone-E; or as described in Table 6, or encoded by the nucleotide sequence in Table 6; or a sequence substantially identical (e.g., at least 80%, 85%, 90%, 92%, 95%, 97%, 98%, 99% or higher identical) to any of the aforesaid sequences; or which have at least one amino acid alteration, but not more than two, three or four alterations (e.g., substitutions, deletions, or insertions, e.g., conservative substitutions) relative to all six CDRs according to Kabat et al. shown in Table 6. In one embodiment, the anti-PD-1 antibody molecule may include any CDR described herein.

[0620] In another embodiment, the anti-PD-1 antibody molecule includes at least one, two, or three Chothia hypervariable loops (e.g., at least one, two, or three hypervariable loops according to the Chothia definition as set out in Table 6) from a heavy chain variable region of an antibody described herein, e.g., an antibody chosen from any of BAP049-hum01, BAP049-hum02, BAP049-hum03, BAP049-hum04, BAP049-hum05, BAP049-hum06, BAP049-hum07, BAP049-hum08, BAP049-hum09, BAP049-hum10, BAP049-hum11, BAP049-hum12, BAP049-hum13, BAP049-hum14, BAP049-hum15, BAP049-hum16, BAP049-Clone-A, BAP049-Clone-B, BAP049-Clone-C, BAP049-Clone-D, or BAP049-Clone-E; or as described in Table 6, or encoded by the nucleotide sequence in Table 6; or at least the amino acids from those hypervariable loops that contact PD-1; or which have at least one amino acid alteration, but not more than two, three or four alterations (e.g., substitutions, deletions, or insertions, e.g., conservative substitutions) relative to one, two, or three hypervariable loops according to Chothia et al. shown in Table 6.

[0621] In another embodiment, the anti-PD-1 antibody molecule includes at least one, two, or three Chothia hypervariable loops (e.g., at least one, two, or three hypervariable loops according to the Chothia definition as set out in Table 6) of a light chain variable region of an antibody described herein, e.g., an antibody chosen from any of BAP049-hum01, BAP049-hum02, BAP049-hum03, BAP049-hum04, BAP049-hum05, BAP049-hum06, BAP049-hum07, BAP049-hum08, BAP049-hum09, BAP049-hum10, BAP049-hum11, BAP049-hum12, BAP049-hum13, BAP049-hum14, BAP049-hum15, BAP049-hum16, BAP049-Clone-A, BAP049-Clone-B, BAP049-Clone-C, BAP049-Clone-D, or BAP049-Clone-E; or as described in Table 6, or encoded by the nucleotide sequence in Table 6; or at least the amino acids from those hypervariable loops that contact PD-1; or which have at least one amino acid alteration, but not more than two, three or four alterations (e.g., substitutions, deletions, or insertions, e.g., conservative substitutions) relative to one, two, or three hypervariable loops according to Chothia et al. shown in Table 6.

[0622] In yet another embodiment, the anti-PD-1 antibody molecule includes at least one, two, three, four, five, or six hypervariable loops (e.g., at least one, two, three, four, five, or six hypervariable loops according to the Chothia definition as set out in Table 6) from the heavy and light chain variable regions of an antibody described herein, e.g., an antibody chosen from any of BAP049-hum01, BAP049-hum02, BAP049-hum03, BAP049-hum04, BAP049-hum05, BAP049-hum06, BAP049-hum07, BAP049-hum08, BAP049-hum09, BAP049-hum10, BAP049-hum11, BAP049-hum12, BAP049-hum13, BAP049-hum14, BAP049-hum15, BAP049-hum16, BAP049-Clone-A, BAP049-Clone-B, BAP049-Clone-C, BAP049-Clone-D, or BAP049-Clone-E; or as described in Table 6, or encoded by the nucleotide sequence in Table 6; or at least the amino acids from those hypervariable loops that contact PD-1; or which have at least one amino acid alteration, but not more than two, three or four alterations (e.g., substitutions, deletions, or insertions, e.g., conservative substitutions) relative to one, two, three, four, five or six hypervariable loops according to Chothia et al. shown in Table 6.

[0623] In one embodiment, the anti-PD-1 antibody molecule includes all six hypervariable loops (e.g., all six hypervariable loops according to the Chothia definition as set out in Table 6) of an antibody described herein, e.g., an antibody chosen from any of BAP049-hum01, BAP049-hum02, BAP049-hum03, BAP049-hum04, BAP049-hum05, BAP049-hum06, BAP049-hum07, BAP049-hum08, BAP049-hum09, BAP049-hum10, BAP049-hum11, BAP049-hum12, BAP049-hum13, BAP049-hum14, BAP049-hum15, BAP049-hum16, BAP049-Clone-A, BAP049-Clone-B, BAP049-Clone-C, BAP049-Clone-D, or BAP049-Clone-E, or closely related hypervariable loops, e.g., hypervariable loops which are identical or which have at least one amino acid alteration, but not more than two, three or four alterations (e.g., substitutions, deletions, or insertions, e.g., conservative substitutions); or which have at least one amino acid alteration, but not more than two, three or four alterations (e.g., substitutions, deletions, or insertions, e.g., conservative substitutions) relative to all six hypervariable loops according to Chothia et al. shown in Table 6. In one embodiment, the anti-PD-1 antibody molecule may include any hypervariable loop described herein.

[0624] In still another embodiment, the anti-PD-1 antibody molecule includes at least one, two, or three hypervariable loops that have the same canonical structures as the corresponding hypervariable loop of an antibody described herein, e.g., an antibody chosen from any of BAP049-hum01, BAP049-hum02, BAP049-hum03, BAP049-hum04, BAP049-hum05, BAP049-hum06, BAP049-hum07, BAP049-hum08, BAP049-hum09, BAP049-hum10, BAP049-hum11, BAP049-hum12, BAP049-hum13, BAP049-hum14, BAP049-hum15, BAP049-hum16, BAP049-Clone-A, BAP049-Clone-B, BAP049-Clone-C, BAP049-Clone-D, or BAP049-Clone-E, e.g., the same canonical structures as at least loop 1 and/or loop 2 of the heavy and/or light chain variable domains of an antibody described herein. See, e.g., Chothia et al., (1992) J. Mol. Biol. 227:799-817; Tomlinson et al., (1992) J. Mol. Biol. 227:776-798 for descriptions of hypervariable loop canonical structures. These structures can be determined by inspection of the tables described in these references.

[0625] In certain embodiments, the anti-PD-1 antibody molecule includes a combination of CDRs or hypervariable loops defined according to the Kabat et al. and Chothia et al.

[0626] In one embodiment, the anti-PD-1 antibody molecule includes at least one, two or three CDRs or hypervariable loops from a heavy chain variable region of an antibody described herein, e.g., an antibody chosen from any of BAP049-hum01, BAP049-hum02, BAP049-hum03, BAP049-hum04, BAP049-hum05, BAP049-hum06, BAP049-hum07, BAP049-hum08, BAP049-hum09, BAP049-hum10, BAP049-hum11, BAP049-hum12, BAP049-hum13, BAP049-hum14, BAP049-hum15, BAP049-hum16, BAP049-Clone-A, BAP049-Clone-B, BAP049-Clone-C, BAP049-Clone-D, or BAP049-Clone-E, according to the Kabat and Chothia definition (e.g., at least one, two, or three CDRs or hypervariable loops according to the Kabat and Chothia definition as set out in Table 6); or encoded by the nucleotide sequence in Table 6; or a sequence substantially identical (e.g., at least 80%, 85%, 90%, 92%, 95%, 97%, 98%, 99% or higher identical) to any of the aforesaid sequences; or which have at least one amino acid alteration, but not more than two, three or four alterations (e.g., substitutions, deletions, or insertions, e.g., conservative substitutions) relative to one, two, or three CDRs or hypervariable loops according to Kabat and/or Chothia shown in Table 6.

[0627] For example, the anti-PD-1 antibody molecule can include VH CDR1 according to Kabat et al. or VH hypervariable loop 1 according to Chothia et al., or a combination thereof, e.g., as shown in Table 6. In one embodiment, the combination of Kabat and Chothia CDR of VH CDR1 comprises the amino acid sequence GYTFTTYWMH (SEQ ID NO: 286), or an amino acid sequence substantially identical thereto (e.g., having at least one amino acid alteration, but not more than two, three or four alterations (e.g., substitutions, deletions, or insertions, e.g., conservative substitutions)). The anti-PD-1 antibody molecule can further include, e.g., VH CDRs 2-3 according to Kabat et al. and VL CDRs 1-3 according to Kabat et al., e.g., as shown in Table 6. Accordingly, in some embodiments, framework regions are defined based on a combination of CDRs defined according to Kabat et al. and hypervariable loops defined according to Chothia et al. For example, the anti-PD-1 antibody molecule can include VH FR1 defined based on VH hypervariable loop 1 according to Chothia et al. and VH FR2 defined based on VH CDRs 1-2 according to Kabat et al., e.g., as shown in Table 6. The anti-PD-1 antibody molecule can further include, e.g., VH FRs 3-4 defined based on VH CDRs 2-3 according to Kabat et al. and VL FRs 1-4 defined based on VL CDRs 1-3 according to Kabat et al.

[0628] The anti-PD-1 antibody molecule can contain any combination of CDRs or hypervariable loops according to the Kabat and Chothia definitions. In one embodiment, the anti-PD-1 antibody molecule includes at least one, two or three CDRs from a light chain variable region of an antibody described herein, e.g., an antibody chosen from any of BAP049-hum01, BAP049-hum02, BAP049-hum03, BAP049-hum04, BAP049-hum05, BAP049-hum06, BAP049-hum07, BAP049-hum08, BAP049-hum09, BAP049-hum10, BAP049-hum11, BAP049-hum12, BAP049-hum13, BAP049-hum14, BAP049-hum15, BAP049-hum16, BAP049-Clone-A, BAP049-Clone-B, BAP049-Clone-C, BAP049-Clone-D, or BAP049-Clone-E, according to the Kabat and Chothia definition (e.g., at least one, two, or three CDRs according to the Kabat and Chothia definition as set out in Table 6).

[0629] In an embodiment, e.g., an embodiment comprising a variable region, a CDR (e.g., Chothia CDR or Kabat CDR), or other sequence referred to herein, e.g., in Table 6, the antibody molecule is a monospecific antibody molecule, a bispecific antibody molecule, or is an antibody molecule that comprises an antigen binding fragment of an antibody, e.g., a half antibody or antigen binding fragment of a half antibody. In certain embodiments the antibody molecule is a bispecific antibody molecule having a first binding specificity for PD-1 and a second binding specificity for TIM-3, LAG-3, CEACAM (e.g., CEACAM-1 and/or CEACAM-5), PD-L1 or PD-L2.

[0630] In one embodiment, the anti-PD-1 antibody molecule includes:

[0631] (a) a heavy chain variable region (VH) comprising a VHCDR1 amino acid sequence of SEQ ID NO: 140, a VHCDR2 amino acid sequence of SEQ ID NO: 141, and a VHCDR3 amino acid sequence of SEQ ID NO: 139; and a light chain variable region (VL) comprising a VLCDR1 amino acid sequence of SEQ ID NO: 149, a VLCDR2 amino acid sequence of SEQ ID NO: 150, and a VLCDR3 amino acid sequence of SEQ ID NO: 167;

[0632] (b) a VH comprising a VHCDR1 amino acid sequence chosen from SEQ ID NO: 137; a VHCDR2 amino acid sequence of SEQ ID NO: 138; and a VHCDR3 amino acid sequence of SEQ ID NO: 139; and a VL comprising a VLCDR1 amino acid sequence of SEQ ID NO: 146, a VLCDR2 amino acid sequence of SEQ ID NO: 147, and a VLCDR3 amino acid sequence of SEQ ID NO: 166;

[0633] (c) a VH comprising a VHCDR1 amino acid sequence of SEQ ID NO: 286, a VHCDR2 amino acid sequence of SEQ ID NO: 141, and a VHCDR3 amino acid sequence of SEQ ID NO: 139; and a VL comprising a VLCDR1 amino acid sequence of SEQ ID NO: 149, a VLCDR2 amino acid sequence of SEQ ID NO: 150, and a VLCDR3 amino acid sequence of SEQ ID NO: 167; or

[0634] (d) a VH comprising a VHCDR1 amino acid sequence of SEQ ID NO: 286; a VHCDR2 amino acid sequence of SEQ ID NO: 138; and a VHCDR3 amino acid sequence of SEQ ID NO: 139; and a VL comprising a VLCDR1 amino acid sequence of SEQ ID NO: 146, a VLCDR2 amino acid sequence of SEQ ID NO: 147, and a VLCDR3 amino acid sequence of SEQ ID NO: 166.

[0635] In one embodiment, the anti-PD-1 antibody molecule comprises a VH comprising a VHCDR1 amino acid sequence of SEQ ID NO: 140, a VHCDR2 amino acid sequence of SEQ ID NO: 141, and a VHCDR3 amino acid sequence of SEQ ID NO: 139; and a VL comprising a VLCDR1 amino acid sequence of SEQ ID NO: 149, a VLCDR2 amino acid sequence of SEQ ID NO: 150, and a VLCDR3 amino acid sequence of SEQ ID NO: 167.

[0636] In one embodiment, the anti-PD-1 antibody molecule comprises a VH comprising a VHCDR1 amino acid sequence of SEQ ID NO: 137; a VHCDR2 amino acid sequence of SEQ ID NO: 138; and a VHCDR3 amino acid sequence of SEQ ID NO: 139; and a VL comprising a VLCDR1 amino acid sequence of SEQ ID NO: 146, a VLCDR2 amino acid sequence of SEQ ID NO: 147, and a VLCDR3 amino acid sequence of SEQ ID NO: 166.

[0637] In one embodiment, the anti-PD-1 antibody molecule comprises a VH comprising a VHCDR1 amino acid sequence of SEQ ID NO: 286, a VHCDR2 amino acid sequence of SEQ ID NO: 141, and a VHCDR3 amino acid sequence of SEQ ID NO: 139; and a VL comprising a VLCDR1 amino acid sequence of SEQ ID NO: 149, a VLCDR2 amino acid sequence of SEQ ID NO: 150, and a VLCDR3 amino acid sequence of SEQ ID NO: 167.

[0638] In one embodiment, the anti-PD-1 antibody molecule comprises a VH comprising a VHCDR1 amino acid sequence of SEQ ID NO: 286; a VHCDR2 amino acid sequence of SEQ ID NO: 138; and a VHCDR3 amino acid sequence of SEQ ID NO: 139; and a VL comprising a VLCDR1 amino acid sequence of SEQ ID NO: 146, a VLCDR2 amino acid sequence of SEQ ID NO: 147, and a VLCDR3 amino acid sequence of SEQ ID NO: 166.

[0639] In one embodiment, the antibody molecule is a humanized antibody molecule. In another embodiment, the antibody molecule is a monospecific antibody molecule. In yet another embodiment, the antibody molecule is a bispecific antibody molecule.

[0640] In one embodiment, the anti-PD-1 antibody molecule includes:

[0641] (i) a heavy chain variable region (VH) including a VHCDR1 amino acid sequence chosen from SEQ ID NO: 137, SEQ ID NO: 140 or SEQ ID NO: 286; a VHCDR2 amino acid sequence of SEQ ID NO: 138; and a VHCDR3 amino acid sequence of SEQ ID NO: 139; and

[0642] (ii) a light chain variable region (VL) including a VLCDR1 amino acid sequence of SEQ ID NO: 146, a VLCDR2 amino acid sequence of SEQ ID NO: 147, and a VLCDR3 amino acid sequence of SEQ ID NO: 166.

[0643] In another embodiment, the anti-PD-1 antibody molecule includes:

[0644] (i) a heavy chain variable region (VH) including a VHCDR1 amino acid sequence chosen from SEQ ID NO: 137, SEQ ID NO: 140 or SEQ ID NO: 286; a VHCDR2 amino acid sequence of SEQ ID NO: 141, and a VHCDR3 amino acid sequence of SEQ ID NO: 139; and

[0645] (ii) a light chain variable region (VL) including a VLCDR1 amino acid sequence of SEQ ID NO: 149, a VLCDR2 amino acid sequence of SEQ ID NO: 150, and a VLCDR3 amino acid sequence of SEQ ID NO: 167.

[0646] In one embodiment, the anti-PD-1 antibody molecule comprises the VHCDR1 amino acid sequence of SEQ ID NO: 137. In another embodiment, the anti-PD-1 antibody molecule comprises the VHCDR1 amino acid sequence of SEQ ID NO: 140. In yet another embodiment, the anti-PD-1 antibody molecule comprises the VHCDR1 amino acid sequence of SEQ ID NO: 286.

[0647] In one embodiment, the light or the heavy chain variable framework (e.g., the region encompassing at least FR1, FR2, FR3, and optionally FR4) of the anti-PD-1 antibody molecule can be chosen from: (a) a light or heavy chain variable framework including at least 80%, 85%, 87% 90%, 92%, 93%, 95%, 97%, 98%, or preferably 100% of the amino acid residues from a human light or heavy chain variable framework, e.g., a light or heavy chain variable framework residue from a human mature antibody, a human germline sequence, or a human consensus sequence; (b) a light or heavy chain variable framework including from 20% to 80%, 40% to 60%, 60% to 90%, or 70% to 95% of the amino acid residues from a human light or heavy chain variable framework, e.g., a light or heavy chain variable framework residue from a human mature antibody, a human germline sequence, or a human consensus sequence; (c) a non-human framework (e.g., a rodent framework); or (d) a non-human framework that has been modified, e.g., to remove antigenic or cytotoxic determinants, e.g., deimmunized, or partially humanized. In one embodiment, the light or heavy chain variable framework region (particularly FR1, FR2 and/or FR3) includes a light or heavy chain variable framework sequence at least 70, 75, 80, 85, 87, 88, 90, 92, 94, 95, 96, 97, 98, 99% identical or identical to the frameworks of a VL or VH segment of a human germline gene.

[0648] In certain embodiments, the anti-PD-1 antibody molecule comprises a heavy chain variable domain having at least one, two, three, four, five, six, seven, ten, fifteen, twenty or more changes, e.g., amino acid substitutions or deletions, from an amino acid sequence of BAP049-chi-HC, e.g., the amino acid sequence of the FR region in the entire variable region, e.g., shown in FIGS. 9A-9B of US 2015/0210769A1, or SEQ ID NO: 154, 156, 158 or 160. In one embodiment, the anti-PD-1 antibody molecule comprises a heavy chain variable domain having one or more of: E at position 1, V at position 5, A at position 9, V at position 11, K at position 12, K at position 13, E at position 16, L at position 18, R at position 19, I or V at position 20, G at position 24, I at position 37, A or S at position 40, T at position 41, S at position 42, R at position 43, M or L at position 48, V or F at position 68, T at position 69, I at position 70, S at position 71, A or R at position 72, K or N at position 74, T or K at position 76, S or N at position 77, L at position 79, L at position 81, E or Q at position 82, M at position 83, S or N at position 84, R at position 87, A at position 88, or T at position 91 of amino acid sequence of BAP049-chi-HC, e.g., the amino acid sequence of the FR in the entire variable region, e.g., shown in FIGS. 9A-9B of US 2015/0210769A1, or SEQ ID NO: 154, 156, 158 or 160.

[0649] Alternatively, or in combination with the heavy chain substitutions of BAP049-chi-HC described herein, the anti-PD-1 antibody molecule comprises a light chain variable domain having at least one, two, three, four, five, six, seven, ten, fifteen, twenty or more amino acid changes, e.g., amino acid substitutions or deletions, from an amino acid sequence of BAP049-chi-LC, e.g., the amino acid sequence shown in FIGS. 10A-10B of US 2015/0210769A1, or SEQ ID NO: 162 or 164. In one embodiment, the anti-PD-1 antibody molecule comprises a heavy chain variable domain having one or more of: E at position 1, V at position 2, Q at position 3, L at position 4, T at position 7, D or L or A at position 9, F or T at position 10, Q at position 11, S or P at position 12, L or A at position 13, S at position 14, P or L or V at position 15, K at position 16, Q or D at position 17, R at position 18, A at position 19, S at position 20, I or L at position 21, T at position 22, L at position 43, K at position 48, A or S at position 49, R or Q at position 51, Y at position 55, I at position 64, S or P at position 66, S at position 69, Y at position 73, G at position 74, E at position 76, F at position 79, N at position 82, N at position 83, L or I at position 84, E at position 85, S or P at position 86, D at position 87, A or F or I at position 89, T or Y at position 91, F at position 93, or Y at position 102 of the amino acid sequence of BAP049-chi-LC, e.g., the amino acid sequence shown in FIGS. 10A-10B of US 2015/0210769A1, or SEQ ID NO: 162 or 164.

[0650] In other embodiments, the anti-PD-1 antibody molecule includes one, two, three, or four heavy chain framework regions (e.g., a VHFW amino acid sequence shown in Table 2 of US 2015/0210769A1, or encoded by the nucleotide sequence shown in Table 2 of US 2015/0210769A1), or a sequence substantially identical thereto.

[0651] In yet other embodiments, the anti-PD-1 antibody molecule includes one, two, three, or four light chain framework regions (e.g., a VLFW amino acid sequence shown in Table 2 of US 2015/0210769A1, or encoded by the nucleotide sequence shown in Table 2 of US 2015/0210769A1), or a sequence substantially identical thereto.

[0652] In other embodiments, the anti-PD-1 antibody molecule includes one, two, three, or four heavy chain framework regions (e.g., a VHFW amino acid sequence shown in Table 2 of US 2015/0210769A1, or encoded by the nucleotide sequence shown in Table 2 of US 2015/0210769A1), or a sequence substantially identical thereto; and one, two, three, or four light chain framework regions (e.g., a VLFW amino acid equence shown in Table 2 of US 2015/0210769A1, or encoded by the nucleotide sequence shown in Table 2 of US 2015/0210769A1), or a sequence substantially identical thereto.

[0653] In some embodiments, the anti-PD-1 antibody molecule comprises the heavy chain framework region 1 (VHFW1) of BAP049-hum01, BAP049-hum02, BAP049-hum03, BAP049-hum04, BAP049-hum05, BAP049-hum06, BAP049-hum07, BAP049-hum08, BAP049-hum09, BAP049-hum10, BAP049-hum11, BAP049-hum12, BAP049-hum13, BAP049-hum15, BAP049-hum16, BAP049-Clone-A, BAP049-Clone-B, BAP049-Clone-C, BAP049-Clone-D, or BAP049-Clone-E (e.g., SEQ ID NO: 147 of US 2015/0210769A1). In some embodiments, the antibody molecule comprises the heavy chain framework region 1 (VHFW1) of BAP049-hum14 or BAP049-hum15 (e.g., SEQ ID NO: 151 of US 2015/0210769A1).

[0654] In some embodiments, the anti-PD-1 antibody molecule comprises the heavy chain framework region 2 (VHFW2) of BAP049-hum01, BAP049-hum02, BAP049-hum05, BAP049-hum06, BAP049-hum07, BAP049-hum09, BAP049-hum11, BAP049-hum12, BAP049-hum13, BAP049-Clone-A, BAP049-Clone-B, BAP049-Clone-C, or BAP049-Clone-E (e.g., SEQ ID NO:

[0655] 153 of US 2015/0210769A1). In some embodiments, the antibody molecule comprises the heavy chain framework region 2 (VHFW2) of BAP049-hum03, BAP049-hum04, BAP049-hum08, BAP049-hum10, BAP049-hum14, BAP049-hum15, or BAP049-Clone-D (e.g., SEQ ID NO: 157 of US 2015/0210769A1). In some embodiments, the antibody molecule comprises the heavy chain framework region 2 (VHFW2) of BAP049-hum16 (e.g., SEQ ID NO: 160 of US 2015/0210769A1).

[0656] In some embodiments, the anti-PD-1 antibody molecule comprises the heavy chain framework region 3 (VHFW3) of BAP049-hum01, BAP049-hum02, BAP049-hum05, BAP049-hum06, BAP049-hum07, BAP049-hum09, BAP049-hum11, BAP049-hum12, BAP049-hum13, BAP049-Clone-A, BAP049-Clone-B, BAP049-Clone-C, or BAP049-Clone-E (e.g., SEQ ID NO: 162 of US 2015/0210769A1). In some embodiments, the antibody molecule comprises the heavy chain framework region 3 (VHFW3) of BAP049-hum03, BAP049-hum04, BAP049-hum08, BAP049-hum10, BAP049-hum14, BAP049-hum15, BAP049-hum16, or BAP049-Clone-D (e.g., SEQ ID NO: 166 of US 2015/0210769A1).

[0657] In some embodiments, the anti-PD-1 antibody molecule comprises the heavy chain framework region 4 (VHFW4) of BAP049-hum01, BAP049-hum02, BAP049-hum03, BAP049-hum04, BAP049-hum05, BAP049-hum06, BAP049-hum07, BAP049-hum08, BAP049-hum09, BAP049-hum10, BAP049-hum11, BAP049-hum12, BAP049-hum13, BAP049-hum14, BAP049-hum15, BAP049-hum16, BAP049-Clone-A, BAP049-Clone-B, BAP049-Clone-C, BAP049-Clone-D, or BAP049-Clone-E (e.g., SEQ ID NO: 169 of US 2015/0210769A1).

[0658] In some embodiments, the anti-PD-1 antibody molecule comprises the light chain framework region 1 (VLFW1) of BAP049-hum08, BAP049-hum09, BAP049-hum15, BAP049-hum16, or BAP049-Clone-C (e.g., SEQ ID NO: 174 of US 2015/0210769A1). In some embodiments, the antibody molecule comprises the light chain framework region 1 (VLFW1) of BAP049-hum01, BAP049-hum04, BAP049-hum05, BAP049-hum07, BAP049-hum10, BAP049-hum11, BAP049-hum14, BAP049-Clone-A, BAP049-Clone-B, BAP049-Clone-D, or BAP049-Clone-E (e.g., SEQ ID NO: 177 of US 2015/0210769A1). In some embodiments, the antibody molecule comprises the light chain framework region 1 (VLFW1) of BAP049-hum06 (e.g., SEQ ID NO: 181 of US 2015/0210769A1). In some embodiments, the antibody molecule comprises the light chain framework region 1 (VLFW1) of BAP049-hum13 (e.g., SEQ ID NO: 183 of US 2015/0210769A1). In some embodiments, the antibody molecule comprises the light chain framework region 1 (VLFW1) of BAP049-hum02, BAP049-hum03, or BAP049-hum12 (e.g., SEQ ID NO: 185 of US 2015/0210769A1).

[0659] In some embodiments, the anti-PD-1 antibody molecule comprises the light chain framework region 2 (VLFW2) of BAP049-hum01, BAP049-hum02, BAP049-hum03, BAP049-hum06, BAP049-hum08, BAP049-hum09, BAP049-hum10, BAP049-hum11, BAP049-hum14, BAP049-hum15, BAP049-hum16, BAP049-Clone-A, BAP049-Clone-B, BAP049-Clone-D, or BAP049-Clone-E (e.g., SEQ ID NO: 187 of US 2015/0210769A1). In some embodiments, the antibody molecule comprises the light chain framework region 2 (VLFW2) of BAP049-hum04, BAP049-hum05, BAP049-hum07, BAP049-hum13, or BAP049-Clone-C (e.g., SEQ ID NO: 191 of US 2015/0210769A1). In some embodiments, the antibody molecule comprises the light chain framework region 2 (VLFW2) of BAP049-hum12 (e.g., SEQ ID NO: 194 of US 2015/0210769A1).

[0660] In some embodiments, the anti-PD-1 antibody molecule comprises the light chain framework region 3 (VLFW3) of BAP049-hum06, BAP049-hum07, BAP049-hum08, BAP049-hum09, BAP049-hum10, BAP049-hum11, BAP049-hum12, BAP049-hum13, BAP049-hum14, BAP049-hum15, BAP049-hum16, BAP049-Clone-C, BAP049-Clone-D, or BAP049-Clone-E (e.g., SEQ ID NO: 196 of US 2015/0210769A1). In some embodiments, the antibody molecule comprises the light chain framework region 3 (VLFW3) of BAP049-hum02 or BAP049-hum03 (e.g., SEQ ID NO: 200 of US 2015/0210769A1). In some embodiments, the antibody molecule comprises the light chain framework region 3 (VLFW3) of BAP049-hum01 or BAP049-Clone-A (e.g., SEQ ID NO: 202 of US 2015/0210769A1). In some embodiments, the antibody molecule comprises the light chain framework region 3 (VLFW3) of BAP049-hum04, BAP049-hum05, or BAP049-Clone-B (e.g., SEQ ID NO: 205 of US 2015/0210769A1).

[0661] In some embodiments, the anti-PD-1 antibody molecule comprises the light chain framework region 4 (VLFW4) of BAP049-hum01, BAP049-hum02, BAP049-hum03, BAP049-hum04, BAP049-hum05, BAP049-hum06, BAP049-hum07, BAP049-hum08, BAP049-hum09, BAP049-hum10, BAP049-hum11, BAP049-hum12, BAP049-hum13, BAP049-hum14, BAP049-hum15, BAP049-hum16, BAP049-Clone-A, BAP049-Clone-B, BAP049-Clone-C, BAP049-Clone-D, or BAP049-Clone-E (e.g., SEQ ID NO: 208 of US 2015/0210769A1).

[0662] In some embodiments, the anti-PD-1 antibody molecule comprises the heavy chain framework regions 1-3 of BAP049-hum01, BAP049-hum02, BAP049-hum05, BAP049-hum06, BAP-hum07, BAP049-hum09, BAP049-hum11, BAP049-hum12, BAP049-hum13, BAP049-Clone-A, BAP049-Clone-B, BAP049-Clone-C, or BAP049-Clone-E (e.g., SEQ ID NO: 147 (VHFW1), SEQ ID NO: 153 (VHFW2), and SEQ ID NO: 162 (VHFW3) of US 2015/0210769A1). In some embodiments, the antibody molecule comprises the heavy chain framework regions 1-3 of BAP049-hum03, BAP049-hum04, BAP049-hum08, BAP049-hum10, or BAP049-Clone-D (e.g., SEQ ID NO: 147 (VHFW1), SEQ ID NO: 157 (VHFW2), and SEQ ID NO: 166 (VHFW3) of US 2015/0210769A1). In some embodiments, the antibody molecule comprises the heavy chain framework regions 1-3 of BAP049-hum14 or BAP049-hum15 (e.g., SEQ ID NO: 151 (VHFW1), SEQ ID NO: 157 (VHFW2), and SEQ ID NO: 166 (VHFW3) of US 2015/0210769A1). In some embodiments, the antibody molecule comprises the heavy chain framework regions 1-3 of BAP049-hum16 (e.g., SEQ ID NO: 147 (VHFW1), SEQ ID NO: 160 (VHFW2), and SEQ ID NO: 166 (VHFW3) of US 2015/0210769A1). In some embodiments, the antibody molecule further comprises the heavy chain framework region 4 (VHFW4) of BAP049-hum01, BAP049-hum02, BAP049-hum03, BAP049-hum04, BAP049-hum05, BAP049-hum06, BAP049-hum07, BAP049-hum08, BAP049-hum09, BAP049-hum10, BAP049-hum11, BAP049-hum12, BAP049-hum13, BAP049-hum14, BAP049-hum15, BAP049-hum16, BAP049-Clone-A, BAP049-Clone-B, BAP049-Clone-C, BAP049-Clone-D, or BAP049-Clone-E (e.g., SEQ ID NO: 169 of US 2015/0210769A1).

[0663] In some embodiments, the anti-PD-1 antibody molecule comprises the light chain framework regions 1-3 of BAP049-hum01 or BAP049-Clone-A (e.g., SEQ ID NO: 177 (VLFW1), SEQ ID NO: 187 (VLFW2), and SEQ ID NO: 202 (VLFW3) of US 2015/0210769A1). In some embodiments, the antibody molecule comprises the light chain framework regions 1-3 of BAP049-hum02 or BAP049-hum03 (e.g., SEQ ID NO: 185 (VLFW1), SEQ ID NO: 187 (VLFW2), and SEQ ID NO: 200 (VLFW3) of US 2015/0210769A1). In some embodiments, the antibody molecule comprises the light chain framework regions 1-3 of BAP049-hum04, BAP049-hum05, or BAP049-Clone-B (e.g., SEQ ID NO: 177 (VLFW1), SEQ ID NO: 191 (VLFW2), and SEQ ID NO: 205 (VLFW3) of US 2015/0210769A1). In some embodiments, the antibody molecule comprises the light chain framework regions 1-3 of BAP049-hum06 (e.g., SEQ ID NO: 181 (VLFW1), SEQ ID NO: 187 (VLFW2), and SEQ ID NO: 196 (VLFW3) of US 2015/0210769A1). In some embodiments, the antibody molecule comprises the light chain framework regions 1-3 of BAP049-hum07 (e.g., SEQ ID NO: 177 (VLFW1), SEQ ID NO: 191 (VLFW2), and SEQ ID NO: 196 (VLFW3) of US 2015/0210769A1). In some embodiments, the antibody molecule comprises the light chain framework regions 1-3 of BAP049-hum08, BAP049-hum09, BAP049-hum15, BAP049-hum16, or BAP049-Clone-C (e.g., SEQ ID NO: 174 (VLFW1), SEQ ID NO: 187 (VLFW2), and SEQ ID NO: 196 (VLFW3) of US 2015/0210769A1). In some embodiments, the antibody molecule comprises the light chain framework regions 1-3 of BAP049-hum10, BAP049-huml1, BAP049-hum14, BAP049-Clone-D, or BAP049-Clone-E (e.g., SEQ ID NO: 177 (VLFW1), SEQ ID NO: 187 (VLFW2), and SEQ ID NO: 196 (VLFW3) of US 2015/0210769A1). In some embodiments, the antibody molecule comprises the light chain framework regions 1-3 of BAP049-hum12 (e.g., SEQ ID NO: 185 (VLFW1), SEQ ID NO: 194 (VLFW2), and SEQ ID NO: 196 (VLFW3) of US 2015/0210769A1). In some embodiments, the antibody molecule comprises the light chain framework regions 1-3 of BAP049-hum13 (e.g., SEQ ID NO: 183 (VLFW1), SEQ ID NO: 191 (VLFW2), and SEQ ID NO: 196 (VLFW3) of US 2015/0210769A1). In some embodiments, the antibody molecule further comprises the light chain framework region 4 (VLFW4) of BAP049-hum01, BAP049-hum02, BAP049-hum03, BAP049-hum04, BAP049-hum05, BAP049-hum06, BAP049-hum07, BAP049-hum08, BAP049-hum09, BAP049-hum10, BAP049-hum11, BAP049-hum12, BAP049-hum13, BAP049-hum14, BAP049-hum15, BAP049-hum16, BAP049-Clone-A, BAP049-Clone-B, BAP049-Clone-C, BAP049-Clone-D, or BAP049-Clone-E (e.g., SEQ ID NO: 208 of US 2015/0210769A1).

[0664] In some embodiments, the anti-PD-1 antibody molecule comprises the heavy chain framework regions 1-3 of BAP049-hum01 or BAP049-Clone-A (e.g., SEQ ID NO: 147 (VHFW1), SEQ ID NO: 153 (VHFW2), and SEQ ID NO: 162 (VHFW3) of US 2015/0210769A1) and the light chain framework regions 1-3 of BAP049-hum01 or BAP049-Clone-A (e.g., SEQ ID NO: 177 (VLFW1), SEQ ID NO: 187 (VLFW2), and SEQ ID NO: 202 (VLFW3) of US 2015/0210769A1).

[0665] In some embodiments, the anti-PD-1 antibody molecule comprises the heavy chain framework regions 1-3 of BAP049-hum02 (e.g., SEQ ID NO: 147 (VHFW1), SEQ ID NO: 153 (VHFW2), and SEQ ID NO: 162 (VHFW3) of US 2015/0210769A1) and the light chain framework regions 1-3 of BAP049-hum02 (e.g., SEQ ID NO: 185 (VLFW1), SEQ ID NO: 187 (VLFW2), and SEQ ID NO: 200 (VLFW3) of US 2015/0210769A1).

[0666] In some embodiments, the anti-PD-1 antibody molecule comprises the heavy chain framework regions 1-3 of BAP049-hum03 (e.g., SEQ ID NO: 147 (VHFW1), SEQ ID NO: 157 (VHFW2), and SEQ ID NO: 166 (VHFW3) of US 2015/0210769A1) and the light chain framework regions 1-3 of BAP049-hum03 (e.g., SEQ ID NO: 185 (VLFW1), SEQ ID NO: 187 (VLFW2), and SEQ ID NO: 200 (VLFW3) of US 2015/0210769A1).

[0667] In some embodiments, the anti-PD-1 antibody molecule comprises the heavy chain framework regions 1-3 of BAP049-hum04 (e.g., SEQ ID NO: 147 (VHFW1), SEQ ID NO: 157 (VHFW2), and SEQ ID NO: 166 (VHFW3) of US 2015/0210769A1) and the light chain framework regions 1-3 of BAP049-hum04 (e.g., SEQ ID NO: 177 (VLFW1), SEQ ID NO: 191 (VLFW2), and SEQ ID NO: 205 (VLFW3) of US 2015/0210769A1).

[0668] In some embodiments, the anti-PD-1 antibody molecule comprises the heavy chain framework regions 1-3 of BAP049-hum05 or BAP049-Clone-B (e.g., SEQ ID NO: 147 (VHFW1), SEQ ID NO: 153 (VHFW2), and SEQ ID NO: 162 (VHFW3) of US 2015/0210769A1) and the light chain framework regions 1-3 of BAP049-hum05 or BAP049-Clone-B (e.g., SEQ ID NO: 177 (VLFW1), SEQ ID NO: 191 (VLFW2), and SEQ ID NO: 205 (VLFW3) of US 2015/0210769A1).

[0669] In some embodiments, the anti-PD-1 antibody molecule comprises the heavy chain framework regions 1-3 of BAP049-hum06 (e.g., SEQ ID NO: 147 (VHFW1), SEQ ID NO: 153 (VHFW2), and SEQ ID NO: 162 (VHFW3) of US 2015/0210769A1) and the light chain framework regions 1-3 of BAP049-hum06 (e.g., SEQ ID NO: 181 (VLFW1), SEQ ID NO: 187 (VLFW2), and SEQ ID NO: 196 (VLFW3) of US 2015/0210769A1).

[0670] In some embodiments, the anti-PD-1 antibody molecule comprises the heavy chain framework regions 1-3 of BAP049-hum07 (e.g., SEQ ID NO: 147 (VHFW1), SEQ ID NO: 153 (VHFW2), and SEQ ID NO: 162 (VHFW3) of US 2015/0210769A1) and the light chain framework regions 1-3 of BAP049-hum07 (e.g., SEQ ID NO: 177 (VLFW1), SEQ ID NO: 191 (VLFW2), and SEQ ID NO: 196 (VLFW3) of US 2015/0210769A1).

[0671] In some embodiments, the anti-PD-1 antibody molecule comprises the heavy chain framework regions 1-3 of BAP049-hum08 (e.g., SEQ ID NO: 147 (VHFW1), SEQ ID NO: 157 (VHFW2), and SEQ ID NO: 166 (VHFW3) of US 2015/0210769A1) and the light chain framework regions 1-3 of BAP049-hum08 (e.g., SEQ ID NO: 174 (VLFW1), SEQ ID NO: 187 (VLFW2), and SEQ ID NO: 196 (VLFW3) of US 2015/0210769A1).

[0672] In some embodiments, the anti-PD-1 antibody molecule comprises the heavy chain framework regions 1-3 of BAP049-hum09 or BAP049-Clone-C (e.g., SEQ ID NO: 147 (VHFW1), SEQ ID NO: 153 (VHFW2), and SEQ ID NO: 162 (VHFW3) of US 2015/0210769A1) and the light chain framework regions 1-3 of BAP049-hum09 or BAP049-Clone-C (e.g., SEQ ID NO: 174 (VLFW1), SEQ ID NO: 187 (VLFW2), and SEQ ID NO: 196 (VLFW3) of US 2015/0210769A1).

[0673] In some embodiments, the anti-PD-1 antibody molecule comprises the heavy chain framework regions 1-3 of BAP049-hum10 or BAP049-Clone-D (e.g., SEQ ID NO: 147 (VHFW1), SEQ ID NO: 157 (VHFW2), and SEQ ID NO: 166 (VHFW3) of US 2015/0210769A1) and the light chain framework regions 1-3 of BAP049-hum10 or BAP049-Clone-D (e.g., SEQ ID NO: 177 (VLFW1), SEQ ID NO: 187 (VLFW2), and SEQ ID NO: 196 (VLFW3) of US 2015/0210769A1).

[0674] In some embodiments, the anti-PD-1 antibody molecule comprises the heavy chain framework regions 1-3 of BAP049-hum11 or BAP049-Clone-E (e.g., SEQ ID NO: 147 (VHFW1), SEQ ID NO: 153 (VHFW2), and SEQ ID NO: 162 (VHFW3) of US 2015/0210769A1) and the light chain framework regions 1-3 of BAP049-hum11 or BAP049-Clone-E (e.g., SEQ ID NO: 177 (VLFW1), SEQ ID NO: 187 (VLFW2), and SEQ ID NO: 196 (VLFW3) of US 2015/0210769A1).

[0675] In some embodiments, the anti-PD-1 antibody molecule comprises the heavy chain framework regions 1-3 of BAP049-hum12 (e.g., SEQ ID NO: 147 (VHFW1), SEQ ID NO: 153 (VHFW2), and SEQ ID NO: 162 (VHFW3) of US 2015/0210769A1) and the light chain framework regions 1-3 of BAP049-hum12 (e.g., SEQ ID NO: 185 (VLFW1), SEQ ID NO: 194 (VLFW2), and SEQ ID NO: 196 (VLFW3) of US 2015/0210769A1).

[0676] In some embodiments, the anti-PD-1 antibody molecule comprises the heavy chain framework regions 1-3 of BAP049-hum13 (e.g., SEQ ID NO: 147 (VHFW1), SEQ ID NO: 153 (VHFW2), and SEQ ID NO: 162 (VHFW3) of US 2015/0210769A1) and the light chain framework regions 1-3 of BAP049-hum13 (e.g., SEQ ID NO: 183 (VLFW1), SEQ ID NO: 191 (VLFW2), and SEQ ID NO: 196 (VLFW3) of US 2015/0210769A1).

[0677] In some embodiments, the anti-PD-1 antibody molecule comprises the heavy chain framework regions 1-3 of BAP049-hum14 (e.g., SEQ ID NO: 151 (VHFW1), SEQ ID NO: 157 (VHFW2), and SEQ ID NO: 166 (VHFW3) of US 2015/0210769A1) and the light chain framework regions 1-3 of BAP049-hum14 (e.g., SEQ ID NO: 177 (VLFW1), SEQ ID NO: 187 (VLFW2), and SEQ ID NO: 196 (VLFW3) of US 2015/0210769A1).

[0678] In some embodiments, the anti-PD-1 antibody molecule comprises the heavy chain framework regions 1-3 of BAP049-hum15 (e.g., SEQ ID NO: 151 (VHFW1), SEQ ID NO: 157 (VHFW2), and SEQ ID NO: 166 (VHFW3) of US 2015/0210769A1) and the light chain framework regions 1-3 of BAP049-hum15 (e.g., SEQ ID NO: 174 (VLFW1), SEQ ID NO: 187 (VLFW2), and SEQ ID NO: 196 (VLFW3) of US 2015/0210769A1).

[0679] In some embodiments, the anti-PD-1 antibody molecule comprises the heavy chain framework regions 1-3 of BAP049-hum16 (e.g., SEQ ID NO: 147 (VHFW1), SEQ ID NO: 160 (VHFW2), and SEQ ID NO: 166 (VHFW3) of US 2015/0210769A1) and the light chain framework regions 1-3 of BAP049-hum16 (e.g., SEQ ID NO: 174 (VLFW1), SEQ ID NO: 187 (VLFW2), and SEQ ID NO: 196 (VLFW3) of US 2015/0210769A1).

[0680] In some embodiments, the anti-PD-1 antibody molecule further comprises the heavy chain framework region 4 (VHFW4) of BAP049-hum01, BAP049-hum02, BAP049-hum03, BAP049-hum04, BAP049-hum05, BAP049-hum06, BAP049-hum07, BAP049-hum08, BAP049-hum09, BAP049-hum10, BAP049-hum11, BAP049-hum12, BAP049-hum13, BAP049-hum14, BAP049-hum15, BAP049-hum16, BAP049-Clone-A, BAP049-Clone-B, BAP049-Clone-C, BAP049-Clone-D, or BAP049-Clone-E (e.g., SEQ ID NO: 169 of US 2015/0210769A1) and the light chain framework region 4 (VLFW4) of BAP049-hum01, BAP049-hum02, BAP049-hum03, BAP049-hum04, BAP049-hum05, BAP049-hum06, BAP049-hum07, BAP049-hum08, BAP049-hum09, BAP049-hum10, BAP049-hum11, BAP049-hum12, BAP049-hum13, BAP049-hum14, BAP049-hum15, BAP049-hum16, BAP049-Clone-A, BAP049-Clone-B, BAP049-Clone-C, BAP049-Clone-D, or BAP049-Clone-E (e.g., SEQ ID NO: 208 of US 2015/0210769A1).

[0681] In some embodiments, the anti-PD-1 antibody molecule comprises a heavy chain framework region having a combination of framework regions FW1, FW2 and FW3 as show in FIG. 5 or 7 of US 2015/0210769A1. In other embodiment, the antibody molecule comprises a light chain framework region having a combination of framework regions FW1, FW2 and FW3 as show in FIG. 5 or 7 of US 2015/0210769A1. In yet other embodiments, the antibody molecule comprises a heavy chain framework region having a combination of framework regions FW1, FW2 and FW3 as show in FIG. 5 or 7 of US 2015/0210769A1, and a light chain framework region having a combination of framework regions FW1, FW2 and FW3 as showin in FIG. 5 or 7 of US 2015/0210769A1.

[0682] In one embodiment, the heavy or light chain variable domain, or both, of the anti-PD-1 antibody molecule includes an amino acid sequence, which is substantially identical to an amino acid disclosed herein, e.g., at least 80%, 85%, 90%, 92%, 95%, 97%, 98%, 99% or higher identical to a variable region of an antibody described herein, e.g., an antibody chosen from any of BAP049-hum01, BAP049-hum02, BAP049-hum03, BAP049-hum04, BAP049-hum05, BAP049-hum06, BAP049-hum07, BAP049-hum08, BAP049-hum09, BAP049-hum10, BAP049-hum11, BAP049-hum12, BAP049-hum13, BAP049-hum14, BAP049-hum15, BAP049-Clone-A, BAP049-Clone-B, BAP049-Clone-C, BAP049-Clone-D, or BAP049-Clone-E; or as described in Table 6, or encoded by the nucleotide sequence in Table 6; or which differs at least 1 or 5 residues, but less than 40, 30, 20, or 10 residues, from a variable region of an antibody described herein.

[0683] In one embodiment, the heavy or light chain variable region, or both, of the anti-PD-1 antibody molecule includes an amino acid sequence encoded by a nucleic acid sequence described herein or a nucleic acid that hybridizes to a nucleic acid sequence described herein (e.g., a nucleic acid sequence as shown in Tables 1 and 2 of US 2015/0210769A1, or Table 6 herein) or its complement, e.g., under low stringency, medium stringency, or high stringency, or other hybridization condition described herein.

[0684] In another embodiment, the anti-PD-1 antibody molecule comprises at least one, two, three, or four antigen-binding regions, e.g., variable regions, having an amino acid sequence as set forth in Table 6, or a sequence substantially identical thereto (e.g., a sequence at least about 85%, 90%, 95%, 99% or more identical thereto, or which differs by no more than 1, 2, 5, 10, or 15 amino acid residues from the sequences shown in Table 6. In another embodiment, the anti-PD-1 antibody molecule includes a VH and/or VL domain encoded by a nucleic acid having a nucleotide sequence as set forth in Table 6, or a sequence substantially identical thereto (e.g., a sequence at least about 85%, 90%, 95%, 99% or more identical thereto, or which differs by no more than 3, 6, 15, 30, or 45 nucleotides from the sequences shown in Table 6.

[0685] In yet another embodiment, the anti-PD-1 antibody molecule comprises at least one, two, or three CDRs from a heavy chain variable region having an amino acid sequence as set forth in Table 6, or a sequence substantially homologous thereto (e.g., a sequence at least about 85%, 90%, 95%, 99% or more identical thereto, and/or having one, two, three or more substitutions, insertions or deletions, e.g., conserved substitutions). In yet another embodiment, the anti-PD-1 antibody molecule comprises at least one, two, or three CDRs from a light chain variable region having an amino acid sequence as set forth in Table 6, or a sequence substantially homologous thereto (e.g., a sequence at least about 85%, 90%, 95%, 99% or more identical thereto, and/or having one, two, three or more substitutions, insertions or deletions, e.g., conserved substitutions). In yet another embodiment, the anti-PD-1 antibody molecule comprises at least one, two, three, four, five or six CDRs from heavy and light chain variable regions having an amino acid sequence as set forth in Table 6), or a sequence substantially homologous thereto (e.g., a sequence at least about 85%, 90%, 95%, 99% or more identical thereto, and/or having one, two, three or more substitutions, insertions or deletions, e.g., conserved substitutions).

[0686] In one embodiment, the anti-PD-1 antibody molecule comprises at least one, two, or three CDRs and/or hypervariable loops from a heavy chain variable region having an amino acid sequence of an antibody described herein, e.g., an antibody chosen from any of BAP049-hum01, BAP049-hum02, BAP049-hum03, BAP049-hum04, BAP049-hum05, BAP049-hum06, BAP049-hum07, BAP049-hum08, BAP049-hum09, BAP049-hum10, BAP049-hum11, BAP049-hum12, BAP049-hum13, BAP049-hum14, BAP049-hum15, BAP049-hum16, BAP049-Clone-A, BAP049-Clone-B, BAP049-Clone-C, BAP049-Clone-D, or BAP049-Clone-E, as summarized in Table 6, or a sequence substantially identical thereto (e.g., a sequence at least about 85%, 90%, 95%, 99% or more identical thereto, and/or having one, two, three or more substitutions, insertions or deletions, e.g., conserved substitutions). In another embodiment, the anti-PD-1 antibody molecule comprises at least one, two, or three CDRs and/or hypervariable loops from a light chain variable region having an amino acid sequence of an antibody described herein, e.g., an antibody chosen from any of BAP049-hum01, BAP049-hum02, BAP049-hum03, BAP049-hum04, BAP049-hum05, BAP049-hum06, BAP049-hum07, BAP049-hum08, BAP049-hum09, BAP049-hum10, BAP049-hum11, BAP049-hum12, BAP049-hum13, BAP049-hum14, BAP049-hum15, BAP049-hum16, BAP049-Clone-A, BAP049-Clone-B, BAP049-Clone-C, BAP049-Clone-D, or BAP049-Clone-E, as summarized in Table 6, or a sequence substantially identical thereto (e.g., a sequence at least about 85%, 90%, 95%, 99% or more identical thereto, and/or having one, two, three or more substitutions, insertions or deletions, e.g., conserved substitutions). In one embodiment, the anti-PD-1 antibody molecule comprises all six CDRs and/or hypervariable loops described herein, e.g., described in Table 6.

[0687] In one embodiment, the anti-PD-1 antibody molecule has a variable region that is identical in sequence, or which differs by 1, 2, 3, or 4 amino acids from a variable region described herein (e.g., an FR region disclosed herein).

[0688] In one embodiment, the anti-PD-1 antibody molecule is a full antibody or fragment thereof (e.g., a Fab, F(ab′)₂, Fv, or a single chain Fv fragment (scFv)). In certain embodiments, the anti-PD-1 antibody molecule is a monoclonal antibody or an antibody with single specificity. The anti-PD-1 antibody molecule can also be a humanized, chimeric, camelid, shark, or an in vitro-generated antibody molecule. In one embodiment, the anti-PD-1 antibody molecule thereof is a humanized antibody molecule. The heavy and light chains of the anti-PD-1 antibody molecule can be full-length (e.g., an antibody can include at least one, and preferably two, complete heavy chains, and at least one, and preferably two, complete light chains) or can include an antigen-binding fragment (e.g., a Fab, F(ab′)₂, Fv, a single chain Fv fragment, a single domain antibody, a diabody (dAb), a bivalent antibody, or bispecific antibody or fragment thereof, a single domain variant thereof, or a camelid antibody).

[0689] In yet other embodiments, the anti-PD-1 antibody molecule has a heavy chain constant region (Fc) chosen from, e.g., the heavy chain constant regions of IgG1, IgG2, IgG3, IgG4, IgM, IgA1, IgA2, IgD, and IgE; particularly, chosen from, e.g., the heavy chain constant regions of IgG1, IgG2, IgG3, and IgG4, more particularly, the heavy chain constant region of IgG1 or IgG2 (e.g., human IgG1, IgG2 or IgG4). In one embodiment, the heavy chain constant region is human

[0690] IgG1. In another embodiment, the anti-PD-1 antibody molecule has a light chain constant region chosen from, e.g., the light chain constant regions of kappa or lambda, preferably kappa (e.g., human kappa). In one embodiment, the constant region is altered, e.g., mutated, to modify the properties of the anti-PD-1 antibody molecule (e.g., to increase or decrease one or more of: Fc receptor binding, antibody glycosylation, the number of cysteine residues, effector cell function, or complement function). For example, the constant region is mutated at positions 296 (M to Y), 298 (S to T), 300 (T to E), 477 (H to K) and 478 (N to F) to alter Fc receptor binding (e.g., the mutated positions correspond to positions 132 (M to Y), 134 (S to T), 136 (T to E), 313 (H to K) and 314 (N to F) of SEQ ID NOs: 212 or 214; or positions 135 (M to Y), 137 (S to T), 139 (T to E), 316 (H to K) and 317 (N to F) of SEQ ID NOs: 215, 216, 217 or 218). In another embodiment, the heavy chain constant region of an IgG4, e.g., a human IgG4, is mutated at position 228 according to EU numbering (e.g., S to P), e.g., as shown in Table 3 of US 2015/0210769A1. In certain embodiments, the anti-PD-1 antibody molecules comprises a human IgG4 mutated at position 228 according to EU numbering (e.g., S to P), e.g., as shown in Table 3 of US 2015/0210769A1; and a kappa light chain constant region, e.g., as shown in Table 3 of US 2015/0210769A1. In still another embodiment, the heavy chain constant region of an IgG1, e.g., a human IgG1, is mutated at one or more of position 297 according to EU numbering (e.g., N to A), position 265 according to EU numbering (e.g., D to A), position 329 according to EU numbering (e.g., P to A), position 234 according to EU numbering (e.g., L to A), or position 235 according to EU numbering (e.g., L to A), e.g., as shown in Table 3 of US 2015/0210769A1.

[0691] In certain embodiments, the anti-PD-1 antibody molecules comprises a human IgG1 mutated at one or more of the aforesaid positions, e.g., as shown in Table 3 of US 2015/0210769A1; and a kappa light chain constant region, e.g., as shown in Table 3 of US 2015/0210769A1.

[0692] In one embodiment, the anti-PD-1 antibody molecule is isolated or recombinant.

[0693] In one embodiment, the anti-PD-1 antibody molecule is a humanized antibody molecule.

[0694] In one embodiment, the anti-PD-1 antibody molecule has a risk score based on T cell epitope analysis of less than 700, 600, 500, 400 or less.

[0695] In one embodiment, the anti-PD-1 antibody molecule is a humanized antibody molecule and has a risk score based on T cell epitope analysis of 300 to 700, 400 to 650, 450 to 600, or a risk score as described herein.

[0696] In one embodiment, the anti-PD-1 antibody molecule includes:

[0697] (a) a heavy chain variable region (VH) comprising a VHCDR1 amino acid sequence of SEQ ID NO: 140, a VHCDR2 amino acid sequence of SEQ ID NO: 141, and a VHCDR3 amino acid sequence of SEQ ID NO: 139; and a light chain variable region (VL) comprising a VLCDR1 amino acid sequence of SEQ ID NO: 149, a VLCDR2 amino acid sequence of SEQ ID NO: 150, and a VLCDR3 amino acid sequence of SEQ ID NO: 167;

[0698] (b) a VH comprising a VHCDR1 amino acid sequence chosen from SEQ ID NO: 137; a VHCDR2 amino acid sequence of SEQ ID NO: 138; and a VHCDR3 amino acid sequence of SEQ ID NO: 139; and a VL comprising a VLCDR1 amino acid sequence of SEQ ID NO: 146, a VLCDR2 amino acid sequence of SEQ ID NO: 147, and a VLCDR3 amino acid sequence of SEQ ID NO: 166;

[0699] (c) a VH comprising a VHCDR1 amino acid sequence of SEQ ID NO: 286, a VHCDR2 amino acid sequence of SEQ ID NO: 141, and a VHCDR3 amino acid sequence of SEQ ID NO: 139; and a VL comprising a VLCDR1 amino acid sequence of SEQ ID NO: 149, a VLCDR2 amino acid sequence of SEQ ID NO: 150, and a VLCDR3 amino acid sequence of SEQ ID NO: 167; or

[0700] (d) a VH comprising a VHCDR1 amino acid sequence of SEQ ID NO: 286; a VHCDR2 amino acid sequence of SEQ ID NO: 138; and a VHCDR3 amino acid sequence of SEQ ID NO: 139; and a VL comprising a VLCDR1 amino acid sequence of SEQ ID NO: 146, a VLCDR2 amino acid sequence of SEQ ID NO: 147, and a VLCDR3 amino acid sequence of SEQ ID NO: 166.

[0701] In certain embodiments, the anti-PD-1 antibody molecule comprises:

[0702] (i) a heavy chain variable region (VH) comprising a VHCDR1 amino acid sequence chosen from SEQ ID NO: 137, SEQ ID NO: 140 or SEQ ID NO: 286; a VHCDR2 amino acid sequence of SEQ ID NO: 138; and a VHCDR3 amino acid sequence of SEQ ID NO: 139; and

[0703] (ii) a light chain variable region (VL) comprising a VLCDR1 amino acid sequence of SEQ ID NO: 146, a VLCDR2 amino acid sequence of SEQ ID NO: 147, and a VLCDR3 amino acid sequence of SEQ ID NO: 166.

[0704] In other embodiments, the anti-PD-1 antibody molecule comprises:

[0705] (i) a heavy chain variable region (VH) comprising a VHCDR1 amino acid sequence chosen from SEQ ID NO: 137, SEQ ID NO: 140 or SEQ ID NO: 286; a VHCDR2 amino acid sequence of SEQ ID NO: 141, and a VHCDR3 amino acid sequence of SEQ ID NO: 139; and

[0706] (ii) a light chain variable region (VL) comprising a VLCDR1 amino acid sequence of SEQ ID NO: 149, a VLCDR2 amino acid sequence of SEQ ID NO: 150, and a VLCDR3 amino acid sequence of SEQ ID NO: 167.

[0707] In embodiments of the aforesaid antibody molecules, the VHCDR1 comprises the amino acid sequence of SEQ ID NO: 137. In other embodiments, the VHCDR1 comprises the amino acid sequence of SEQ ID NO: 140. In yet other embodiments, the VHCDR1 amino acid sequence of SEQ ID NO: 286.

[0708] In embodiments, the aforesaid antibody molecules have a heavy chain variable region comprising at least one framework (FW) region comprising the amino acid sequence of any of SEQ ID NOs: 147, 151, 153, 157, 160, 162, 166, or 169 of US 2015/0210769A1, or an amino acid sequence at least 90% identical thereto, or having no more than two amino acid substitutions, insertions or deletions compared to the amino acid sequence of any of SEQ ID NOs: 147, 151, 153, 157, 160, 162, 166, or 169 of US 2015/0210769A1.

[0709] In other embodiments, the aforesaid antibody molecules have a heavy chain variable region comprising at least one framework region comprising the amino acid sequence of any of SEQ ID NOs: 147, 151, 153, 157, 160, 162, 166, or 169 of US 2015/0210769A1.

[0710] In yet other embodiments, the aforesaid antibody molecules have a heavy chain variable region comprising at least two, three, or four framework regions comprising the amino acid sequences of any of SEQ ID NOs: 147, 151, 153, 157, 160, 162, 166, or 169 of US 2015/0210769A1.

[0711] In other embodiments, the aforesaid antibody molecules comprise a VHFW1 amino acid sequence of SEQ ID NO: 147 or 151 of US 2015/0210769A1, a VHFW2 amino acid sequence of SEQ ID NO: 153, 157, or 160 of US 2015/0210769A1, and a VHFW3 amino acid sequence of SEQ ID NO: 162 or 166 of US 2015/0210769A1, and, optionally, further comprising a VHFW4 amino acid sequence of SEQ ID NO: 169 of US 2015/0210769A1.

[0712] In other embodiments, the aforesaid antibody molecules have a light chain variable region comprising at least one framework region comprising the amino acid sequence of any of SEQ ID NOs: 174, 177, 181, 183, 185, 187, 191, 194, 196, 200, 202, 205, or 208 of US 2015/0210769A1, or an amino acid sequence at least 90% identical thereto, or having no more than two amino acid substitutions, insertions or deletions compared to the amino acid sequence of any of 174, 177, 181, 183, 185, 187, 191, 194, 196, 200, 202, 205, or 208 of US 2015/0210769A1.

[0713] In other embodiments, the aforesaid antibody molecules have a light chain variable region comprising at least one framework region comprising the amino acid sequence of any of SEQ ID NOs: 174, 177, 181, 183, 185, 187, 191, 194, 196, 200, 202, 205, or 208 of US 2015/0210769A1.

[0714] In other embodiments, the aforesaid antibody molecules have a light chain variable region comprising at least two, three, or four framework regions comprising the amino acid sequences of any of SEQ ID NOs: 174, 177, 181, 183, 185, 187, 191, 194, 196, 200, 202, 205, or 208 of US 2015/0210769A1.

[0715] In other embodiments, the aforesaid antibody molecules comprise a VLFW1 amino acid sequence of SEQ ID NO: 174, 177, 181, 183, or 185 of US 2015/0210769A1, a VLFW2 amino acid sequence of SEQ ID NO: 187, 191, or 194 of US 2015/0210769A1, and a VLFW3 amino acid sequence of SEQ ID NO: 196, 200, 202, or 205 of US 2015/0210769A1, and, optionally, further comprising a VLFW4 amino acid sequence of SEQ ID NO: 208 of US 2015/0210769A1.

[0716] In other embodiments, the aforesaid antibodies comprise a heavy chain variable domain comprising an amino acid sequence at least 85% identical to any of SEQ ID NOs: 172, 184, 216, or 220.

[0717] In other embodiments, the aforesaid antibody molecules comprise a heavy chain variable domain comprising the amino acid sequence of SEQ ID NO: 172, 184, 216, or 220.

[0718] In other embodiments, the aforesaid antibody molecules comprise a light chain variable domain comprising an amino acid sequence at least 85% identical to any of SEQ ID NOs: 176, 180, 188, 192, 196, 200, 204, 208, or 212.

[0719] In other embodiments, the aforesaid antibody molecules comprise a light chain variable domain comprising the amino acid sequence of SEQ ID NO: 176, 180, 188, 192, 196, 200, 204, 208, or 212.

[0720] In other embodiments, the aforesaid antibody molecules comprise a heavy chain variable domain comprising the amino acid sequence of SEQ ID NO: 172.

[0721] In other embodiments, the aforesaid antibody molecules comprise a heavy chain comprising the amino acid sequence of SEQ ID NO: 174.

[0722] In other embodiments, the aforesaid antibody molecules comprise a heavy chain comprising the amino acid sequence of SEQ ID NO: 225.

[0723] In other embodiments, the aforesaid antibody molecules comprise a heavy chain variable domain comprising the amino acid sequence of SEQ ID NO: 184.

[0724] In other embodiments, the aforesaid antibody molecules comprise a heavy chain comprising the amino acid sequence of SEQ ID NO: 186 or SEQ ID NO: 236.

[0725] In other embodiments, the aforesaid antibody molecules comprise a heavy chain variable domain comprising the amino acid sequence of SEQ ID NO: 216.

[0726] In other embodiments, the aforesaid antibody molecules comprise a heavy chain comprising the amino acid sequence of SEQ ID NO: 218.

[0727] In other embodiments, the aforesaid antibody molecules comprise a heavy chain variable domain comprising the amino acid sequence of SEQ ID NO: 220.

[0728] In other embodiments, the aforesaid antibody molecules comprise a heavy chain comprising the amino acid sequence of SEQ ID NO: 222.

[0729] In other embodiments, the aforesaid antibody molecules comprise a light chain variable domain comprising the amino acid sequence of SEQ ID NO: 176.

[0730] In other embodiments, the aforesaid antibody molecules comprise a light chain comprising the amino acid sequence of SEQ ID NO: 178.

[0731] In other embodiments, the aforesaid antibody molecules comprise a light chain variable domain comprising the amino acid sequence of SEQ ID NO: 180.

[0732] In other embodiments, the aforesaid antibody molecules comprise a light chain comprising the amino acid sequence of SEQ ID NO: 182.

[0733] In other embodiments, the aforesaid antibody molecules comprise a light chain variable domain comprising the amino acid sequence of SEQ ID NO: 188.

[0734] In other embodiments, the aforesaid antibody molecules comprise a light chain comprising the amino acid sequence of SEQ ID NO: 190.

[0735] In other embodiments, the aforesaid antibody molecules comprise a light chain variable domain comprising the amino acid sequence of SEQ ID NO: 192.

[0736] In other embodiments, the aforesaid antibody molecules comprise a light chain comprising the amino acid sequence of SEQ ID NO: 194.

[0737] In other embodiments, the aforesaid antibody molecules comprise a light chain variable domain comprising the amino acid sequence of SEQ ID NO: 196.

[0738] In other embodiments, the aforesaid antibodies comprise a light chain comprising the amino acid sequence of SEQ ID NO: 198.

[0739] In other embodiments, the aforesaid antibody molecules comprise a light chain variable domain comprising the amino acid sequence of SEQ ID NO: 200.

[0740] In other embodiments, the aforesaid antibody molecules comprise a light chain comprising the amino acid sequence of SEQ ID NO: 202.

[0741] In other embodiments, the aforesaid antibody molecules comprise a light chain variable domain comprising the amino acid sequence of SEQ ID NO: 204.

[0742] In other embodiments, the aforesaid antibody molecules comprise a light chain comprising the amino acid sequence of SEQ ID NO: 206.

[0743] In other embodiments, the aforesaid antibody molecules comprise a light chain variable domain comprising the amino acid sequence of SEQ ID NO: 208.

[0744] In other embodiments, the aforesaid antibody molecules comprise a light chain comprising the amino acid sequence of SEQ ID NO: 210.

[0745] In other embodiments, the aforesaid antibody molecules comprise a light chain variable domain comprising the amino acid sequence of SEQ ID NO: 212.

[0746] In other embodiments, the aforesaid antibody molecules comprise a light chain comprising the amino acid sequence of SEQ ID NO: 214.

[0747] In other embodiments, the aforesaid antibody molecules comprise a heavy chain variable domain comprising the amino acid sequence of SEQ ID NO: 172 and a light chain variable domain comprising the amino acid sequence of SEQ ID NO: 176.

[0748] In other embodiments, the aforesaid antibody molecules comprise a heavy chain variable domain comprising the amino acid sequence of SEQ ID NO: 172 and a light chain variable domain comprising the amino acid sequence of SEQ ID NO: 200.

[0749] In other embodiments, the aforesaid antibody molecules comprise a heavy chain variable domain comprising the amino acid sequence of SEQ ID NO: 172 and a light chain variable domain comprising the amino acid sequence of SEQ ID NO: 204.

[0750] In other embodiments, the aforesaid antibody molecules comprise a heavy chain variable domain comprising the amino acid sequence of SEQ ID NO: 184 and a light chain variable domain comprising the amino acid sequence of SEQ ID NO: 204.

[0751] In other embodiments, the aforesaid antibody molecules comprise a heavy chain variable domain comprising the amino acid sequence of SEQ ID NO: 172 and a light chain variable domain comprising the amino acid sequence of SEQ ID NO: 180.

[0752] In other embodiments, the aforesaid antibody molecules comprise a heavy chain variable domain comprising the amino acid sequence of SEQ ID NO: 184 and a light chain variable domain comprising the amino acid sequence of SEQ ID NO: 180.

[0753] In other embodiments, the aforesaid antibody molecules comprise a heavy chain variable domain comprising the amino acid sequence of SEQ ID NO: 184 and a light chain variable domain comprising the amino acid sequence of SEQ ID NO: 188.

[0754] In other embodiments, the aforesaid antibody molecules comprise a heavy chain variable domain comprising the amino acid sequence of SEQ ID NO: 172 and a light chain variable domain comprising the amino acid sequence of SEQ ID NO: 188.

[0755] In other embodiments, the aforesaid antibody molecules comprise a heavy chain variable domain comprising the amino acid sequence of SEQ ID NO: 172 and a light chain variable domain comprising the amino acid sequence of SEQ ID NO: 192.

[0756] In other embodiments, the aforesaid antibody molecules comprise a heavy chain variable domain comprising the amino acid sequence of SEQ ID NO: 172 and a light chain variable domain comprising the amino acid sequence of SEQ ID NO: 196.

[0757] In other embodiments, the aforesaid antibody molecules comprise a heavy chain variable domain comprising the amino acid sequence of SEQ ID NO: 184 and a light chain variable domain comprising the amino acid sequence of SEQ ID NO: 200.

[0758] In other embodiments, the aforesaid antibody molecules comprise a heavy chain variable domain comprising the amino acid sequence of SEQ ID NO: 172 and a light chain variable domain comprising the amino acid sequence of SEQ ID NO: 208.

[0759] In other embodiments, the aforesaid antibody molecules comprise a heavy chain variable domain comprising the amino acid sequence of SEQ ID NO: 172 and a light chain variable domain comprising the amino acid sequence of SEQ ID NO: 212.

[0760] In other embodiments, the aforesaid antibody molecules comprise a heavy chain variable domain comprising the amino acid sequence of SEQ ID NO: 216 and a light chain variable domain comprising the amino acid sequence of SEQ ID NO: 204.

[0761] In other embodiments, the aforesaid antibody molecules comprise a heavy chain variable domain comprising the amino acid sequence of SEQ ID NO: 216 and a light chain variable domain comprising the amino acid sequence of SEQ ID NO: 200.

[0762] In other embodiments, the aforesaid antibody molecules comprise a heavy chain variable domain comprising the amino acid sequence of SEQ ID NO: 220 and a light chain variable domain comprising the amino acid sequence of SEQ ID NO: 200.

[0763] In other embodiments, the aforesaid antibody molecules comprise a heavy chain comprising the amino acid sequence of SEQ ID NO: 225 and a light chain comprising the amino acid sequence of SEQ ID NO: 178.

[0764] In other embodiments, the aforesaid antibody molecules comprise a heavy chain comprising the amino acid sequence of SEQ ID NO: 225 and a light chain comprising the amino acid sequence of SEQ ID NO: 190.

[0765] In other embodiments, the aforesaid antibody molecules comprise a heavy chain comprising the amino acid sequence of SEQ ID NO: 225 and a light chain comprising the amino acid sequence of SEQ ID NO: 202.

[0766] In other embodiments, the aforesaid antibody molecules comprise a heavy chain comprising the amino acid sequence of SEQ ID NO: 225 and a light chain comprising the amino acid sequence of SEQ ID NO: 206.

[0767] In other embodiments, the aforesaid antibody molecules comprise a heavy chain comprising the amino acid sequence of SEQ ID NO: 236 and a light chain comprising the amino acid sequence of SEQ ID NO: 206.

[0768] In other embodiments, the aforesaid antibody molecules comprise a heavy chain comprising the amino acid sequence of SEQ ID NO: 174 and a light chain comprising the amino acid sequence of SEQ ID NO: 178.

[0769] In other embodiments, the aforesaid antibody molecules comprise a heavy chain comprising the amino acid sequence of SEQ ID NO: 174 and a light chain comprising the amino acid sequence of SEQ ID NO: 182.

[0770] In other embodiments, the aforesaid antibody molecules comprise a heavy chain comprising the amino acid sequence of SEQ ID NO: 186 and a light chain comprising the amino acid sequence of SEQ ID NO: 182.

[0771] In other embodiments, the aforesaid antibody molecules comprise a heavy chain comprising the amino acid sequence of SEQ ID NO: 186 and a light chain comprising the amino acid sequence of SEQ ID NO: 190.

[0772] In other embodiments, the aforesaid antibody molecules comprise a heavy chain comprising the amino acid sequence of SEQ ID NO: 174 and a light chain comprising the amino acid sequence of SEQ ID NO: 190.

[0773] In other embodiments, the aforesaid antibodies comprise a heavy chain comprising the amino acid sequence of SEQ ID NO: 174 and a light chain comprising the amino acid sequence of SEQ ID NO: 194.

[0774] In other embodiments, the aforesaid antibody molecules comprise a heavy chain comprising the amino acid sequence of SEQ ID NO: 174 and a light chain comprising the amino acid sequence of SEQ ID NO: 198.

[0775] In other embodiments, the aforesaid antibody molecules comprise a heavy chain comprising the amino acid sequence of SEQ ID NO: 186 and a light chain comprising the amino acid sequence of SEQ ID NO: 202.

[0776] In other embodiments, the aforesaid antibody molecules comprise a heavy chain comprising the amino acid sequence of SEQ ID NO: 174 and a light chain comprising the amino acid sequence of SEQ ID NO: 202.

[0777] In other embodiments, the aforesaid antibody molecules comprise a heavy chain comprising the amino acid sequence of SEQ ID NO: 186 and a light chain comprising the amino acid sequence of SEQ ID NO: 206.

[0778] In other embodiments, the aforesaid antibody molecules comprise a heavy chain comprising the amino acid sequence of SEQ ID NO: 174 and a light chain comprising the amino acid sequence of SEQ ID NO: 206.

[0779] In other embodiments, the aforesaid antibody molecules comprise a heavy chain comprising the amino acid sequence of SEQ ID NO: 174 and a light chain comprising the amino acid sequence of SEQ ID NO: 210.

[0780] In other embodiments, the aforesaid antibody molecules comprise a heavy chain comprising the amino acid sequence of SEQ ID NO: 174 and a light chain comprising the amino acid sequence of SEQ ID NO: 214.

[0781] In other embodiments, the aforesaid antibody molecules comprise a heavy chain comprising the amino acid sequence of SEQ ID NO: 218 and a light chain comprising the amino acid sequence of SEQ ID NO: 206.

[0782] In other embodiments, the aforesaid antibodies comprise a heavy chain comprising the amino acid sequence of SEQ ID NO: 218 and a light chain comprising the amino acid sequence of SEQ ID NO: 202.

[0783] In other embodiments, the aforesaid antibody molecules comprise a heavy chain comprising the amino acid sequence of SEQ ID NO: 222 and a light chain comprising the amino acid sequence of SEQ ID NO: 202.

[0784] In other embodiments, the aforesaid antibody molecules are chosen from a Fab, F(ab′)2, Fv, or a single chain Fv fragment (scFv).

[0785] In other embodiments, the aforesaid antibody molecules comprise a heavy chain constant region selected from IgG1, IgG2, IgG3, and IgG4.

[0786] In other embodiments, the aforesaid antibody molecules comprise a light chain constant region chosen from the light chain constant regions of kappa or lambda.

[0787] In other embodiments, the aforesaid antibody molecules comprise a human IgG4 heavy chain constant region with a mutation at position 228 according to EU numbering or position 108 of SEQ ID NO: 212 or 214 of US 2015/0210769A1 and a kappa light chain constant region.

[0788] In other embodiments, the aforesaid antibody molecules comprise a human IgG4 heavy chain constant region with a Serine to Proline mutation at position 228 according to EU numbering or position 108 of SEQ ID NO: 212 or 214 of US 2015/0210769A1 and a kappa light chain constant region.

[0789] In other embodiments, the aforesaid antibody molecules comprise a human IgG1 heavy chain constant region with an Asparagine to Alanine mutation at position 297 according to EU numbering or position 180 of SEQ ID NO: 216 of US 2015/0210769A1 and a kappa light chain constant region.

[0790] In other embodiments, the aforesaid antibody molecules comprise a human IgG1 heavy chain constant region with an Aspartate to Alanine mutation at position 265 according to EU numbering or position 148 of SEQ ID NO: 217 of US 2015/0210769A1, and Proline to Alanine mutation at position 329 according to EU numbering or position 212 of SEQ ID NO: 217 of US 2015/0210769A1 and a kappa light chain constant region.

[0791] In other embodiments, the aforesaid antibody molecules comprise a human IgG1 heavy chain constant region with a Leucine to Alanine mutation at position 234 according to EU numbering or position 117 of SEQ ID NO: 218 of US 2015/0210769A1, and Leucine to Alanine mutation at position 235 according to EU numbering or position 118 of SEQ ID NO: 218 of US 2015/0210769A1 and a kappa light chain constant region.

[0792] In other embodiments, the aforesaid antibody molecules are capable of binding to human PD-1 with a dissociation constant (K_{D}) of less than about 0.2 nM.

[0793] In some embodiments, the aforesaid antibody molecules bind to human PD-1 with a K_{D} of less than about 0.2 nM, 0.15 nM, 0.1 nM, 0.05 nM, or 0.02 nM, e.g., about 0.13 nM to 0.03 nM, e.g., about 0.077 nM to 0.088 nM, e.g., about 0.083 nM, e.g., as measured by a Biacore method.

[0794] In other embodiments, the aforesaid antibody molecules bind to cynomolgus PD-1 with a K_{D} of less than about 0.2 nM, 0.15 nM, 0.1 nM, 0.05 nM, or 0.02 nM, e.g., about 0.11 nM to 0.08 nM, e.g., about 0.093 nM, e.g., as measured by a Biacore method.

[0795] In certain embodiments, the aforesaid antibody molecules bind to both human PD-1 and cynomolgus PD-1 with similar K_{D}, e.g., in the nM range, e.g., as measured by a Biacore method. In some embodiments, the aforesaid antibody molecules bind to a human PD-1-Ig fusion protein with a K_{D} of less than about 0.1 nM, 0.075 nM, 0.05 nM, 0.025 nM, or 0.01 nM, e.g., about 0.04 nM, e.g., as measured by ELISA.

[0796] In some embodiments, the aforesaid antibody molecules bind to Jurkat cells that express human PD-1 (e.g., human PD-1-transfected Jurkat cells) with a K_{D} of less than about 0.1 nM, 0.075 nM, 0.05 nM, 0.025 nM, or 0.01 nM, e.g., about 0.06 nM, e.g., as measured by FACS analysis.

[0797] In some embodiments, the aforesaid antibody molecules bind to cynomolgus T cells with a K_{D} of less than about 1 nM, 0.75 nM, 0.5 nM, 0.25 nM, or 0.1 nM, e.g., about 0.4 nM, e.g., as measured by FACS analysis.

[0798] In some embodiments, the aforesaid antibody molecules bind to cells that express cynomolgus PD-1 (e.g., cells transfected with cynomolgus PD-1) with a K_{D} of less than about 1 nM, 0.75 nM, 0.5 nM, 0.25 nM, or 0.01 nM, e.g., about 0.6 nM, e.g., as measured by FACS analysis.

[0799] In certain embodiments, the aforesaid antibody molecules are not cross-reactive with mouse or rat PD-1. In other embodiments, the aforesaid antibodies are cross-reactive with rhesus PD-1. For example, the cross-reactivity can be measured by a Biacore method or a binding assay using cells that expresses PD-1 (e.g., human PD-1-expressing 300.19 cells). In other embodiments, the aforesaid antibody molecules bind an extracellular Ig-like domain of PD-1.

[0800] In other embodiments, the aforesaid antibody molecules are capable of reducing binding of PD-1 to PD-L1, PD-L2, or both, or a cell that expresses PD-L1, PD-L2, or both. In some embodiments, the aforesaid antibody molecules reduce (e.g., block) PD-L1 binding to a cell that expresses PD-1 (e.g., human PD-1-expressing 300.19 cells) with an IC50 of less than about 1.5 nM, 1 nM, 0.8 nM, 0.6 nM, 0.4 nM, 0.2 nM, or 0.1 nM, e.g., between about 0.79 nM and about 1.09 nM, e.g., about 0.94 nM, or about 0.78 nM or less, e.g., about 0.3 nM. In some embodiments, the aforesaid antibodies reduce (e.g., block) PD-L2 binding to a cell that expresses PD-1 (e.g., human PD-1-expressing 300.19 cells) with an IC50 of less than about 2 nM, 1.5 nM, 1 nM, 0.5 nM, or 0.2 nM, e.g., between about 1.05 nM and about 1.55 nM, or about 1.3 nM or less, e.g., about 0.9 nM.

[0801] In other embodiments, the aforesaid antibody molecules are capable of enhancing an antigen-specific T cell response.

[0802] In embodiments, the antibody molecule is a monospecific antibody molecule or a bispecific antibody molecule. In embodiments, the antibody molecule has a first binding specificity for PD-1 and a second binding specifity for TIM-3, LAG-3, CEACAM (e.g., CEACAM-1, CEACAM-3, and/or CEACAM-5), PD-L1 or PD-L2. In embodiments, the antibody molecule comprises an antigen binding fragment of an antibody, e.g., a half antibody or antigen binding fragment of a half antibody.

[0803] In some embodiments, the aforesaid antibody molecules increase the expression of IL-2 from cells activated by Staphylococcal enterotoxin B (SEB) (e.g., at 25 μg/mL) by at least about 2, 3, 4, 5-fold, e.g., about 2 to 3-fold, e.g., about 2 to 2.6-fold, e.g., about 2.3-fold, compared to the expression of IL-2 when an isotype control (e.g., IgG4) is used, e.g., as measured in a SEB T cell activation assay or a human whole blood ex vivo assay.

[0804] In some embodiments, the aforesaid antibody molecules increase the expression of IFN-γ from T cells stimulated by anti-CD3 (e.g., at 0.1 μg/mL) by at least about 2, 3, 4, 5-fold, e.g., about 1.2 to 3.4-fold, e.g., about 2.3-fold, compared to the expression of IFN-γ when an isotype control (e.g., IgG4) is used, e.g., as measured in an IFN-γ activity assay.

[0805] In some embodiments, the aforesaid antibody molecules increase the expression of IFN-γ from T cells activated by SEB (e.g., at 3 pg/mL) by at least about 2, 3, 4, 5-fold, e.g., about 0.5 to 4.5-fold, e.g., about 2.5-fold, compared to the expression of IFN-γ when an isotype control (e.g., IgG4) is used, e.g., as measured in an IFN-γ activity assay.

[0806] In some embodiments, the aforesaid antibody molecules increase the expression of IFN-γ from T cells activated with an CMV peptide by at least about 2, 3, 4, 5-fold, e.g., about 2 to 3.6-fold, e.g., about 2.8-fold, compared to the expression of IFN-γ when an isotype control (e.g., IgG4) is used, e.g., as measured in an IFN-γ activity assay.

[0807] In some embodiments, the aforesaid antibody molecules increase the proliferation of CD8⁺ T cells activated with an CMV peptide by at least about 1, 2, 3, 4, 5-fold, e.g., about 1.5-fold, compared to the proliferation of CD8⁺ T cells when an isotype control (e.g., IgG4) is used, e.g., as measured by the percentage of CD8+ T cells that passed through at least n (e.g., n=2 or 4) cell divisions.

[0808] In certain embodiments, the aforesaid antibody molecules has a Cmax between about 100 μg/mL and about 500 μg/mL, between about 150 μg/mL and about 450 μg/mL, between about 250 μg/mL and about 350 μg/mL, or between about 200 μg/mL and about 400 μg/mL, e.g., about 292.5 μg/mL, e.g., as measured in monkey.

[0809] In certain embodiments, the aforesaid antibody molecules has a T₁₁₂ between about 250 hours and about 650 hours, between about 300 hours and about 600 hours, between about 350 hours and about 550 hours, or between about 400 hours and about 500 hours, e.g., about 465.5 hours, e.g., as measured in monkey.

[0810] In some embodiments, the aforesaid antibody molecules bind to PD-1 with a Kd slower than 5×10⁻⁴, 1×10⁻⁴, 5×10⁻⁵, or 1×10⁻⁵ s⁻¹, e.g., about 2.13×10⁻⁴ s⁻¹, e.g., as measured by a Biacore method. In some embodiments, the aforesaid antibody molecules bind to PD-1 with a Ka faster than 1×10⁴, 5×10⁴, 1×10⁵, or 5×10⁵ M⁻¹s⁻¹, e.g., about 2.78×10⁵ M⁻¹s⁻¹, e.g., as measured by a Biacore method.

[0811] In some embodiments, the aforesaid anti-PD-1 antibody molecules bind to one or more residues within the C strand, CC′ loop, C′ strand and FG loop of PD-1. The domain structure of PD-1 is described, e.g., in Cheng et al., “Structure and Interactions of the Human Programmed Cell Death 1 Receptor” J. Biol. Chem. 2013, 288:11771-11785. As described in Cheng et. al., the C strand comprises residues F43-M50, the CC′ loop comprises S51-N54, the C′ strand comprises residues Q55-F62, and the FG loop comprises residues L108-I114 (amino acid numbering according to Chang et al. supra). Accordingly, in some embodiments, an anti-PD-1 antibody as described herein binds to at least one residue in one or more of the ranges F43-M50, S51-N54, Q55-F62, and L108-I114 of PD-1. In some embodiments, an anti-PD-1 antibody as described herein binds to at least one residue in two, three, or all four of the ranges F43-M50, S51-N54, Q55-F62, and L108-I114 of PD-1. In some embodiments, the anti-PD-1 antibody binds to a residue in PD-1 that is also part of a binding site for one or both of PD-L1 and PD-L2.

[0812] In another aspect, the invention provides an isolated nucleic acid molecule encoding any of the aforesaid antibody molecules, vectors and host cells thereof.

[0813] An isolated nucleic acid encoding the antibody heavy chain variable region or light chain variable region, or both, of any the aforesaid antibody molecules is also provided.

[0814] In one embodiment, the isolated nucleic acid encodes heavy chain CDRs 1-3, wherein said nucleic acid comprises a nucleotide sequence of SEQ ID NO: 242-246, 255, 256-260, 267-271, or 278-280.

[0815] In another embodiment, the isolated nucleic acid encodes light chain CDRs 1-3, wherein said nucleic acid comprises a nucleotide sequence of SEQ ID NO: 247-254, 261-266, or 272-277.

[0816] In other embodiments, the aforesaid nucleic acid further comprises a nucleotide sequence encoding a heavy chain variable domain, wherein said nucleotide sequence is at least 85% identical to any of SEQ ID NO: 173, 185, 217, 221, 224, 229, or 235.

[0817] In other embodiments, the aforesaid nucleic acid further comprises a nucleotide sequence encoding a heavy chain variable domain, wherein said nucleotide sequence comprises any of SEQ ID NO: 173, 185, 217, 221, 224, 229, or 235.

[0818] In other embodiments, the aforesaid nucleic acid further comprises a nucleotide sequence encoding a heavy chain, wherein said nucleotide sequence is at least 85% identical to any of SEQ ID NO: 175, 187, 219, 223, 226, 230, or 237.

[0819] In other embodiments, the aforesaid nucleic acid further comprises a nucleotide sequence encoding a heavy chain, wherein said nucleotide sequence comprises any of SEQ ID NO: 175, 187, 219, 223, 226, 230, or 237.

[0820] In other embodiments, the aforesaid nucleic acid further comprises a nucleotide sequence encoding a light chain variable domain, wherein said nucleotide sequence is at least 85% identical to any of SEQ ID NO: 177, 181, 189, 193, 197, 201, 205, 209, 213, 227, 231, 233, 238, or 240.

[0821] In other embodiments, the aforesaid nucleic acid further comprises a nucleotide sequence encoding a light chain variable domain, wherein said nucleotide sequence comprises any of SEQ ID NO: 177, 181, 189, 193, 197, 201, 205, 209, 213, 227, 231, 233, 238, or 240.

[0822] In other embodiments, the aforesaid nucleic acid further comprises a nucleotide sequence encoding a light chain, wherein said nucleotide sequence is at least 85% identical to any of SEQ ID NO: 179, 183, 191, 195, 199, 203, 207, 211, 215, 228, 232, 234, 239 or 241.

[0823] In other embodiments, the aforesaid nucleic acid further comprises a nucleotide sequence encoding a light chain, wherein said nucleotide sequence comprises any of SEQ ID NO: 179, 183, 191, 195, 199,203,207, 211, 215, 228, 232, 234, 239 or 241.

[0824] In certain embodiments, one or more expression vectors and host cells comprising the aforesaid nucleic acids are provided.

[0825] A method of producing an antibody molecule or fragment thereof, comprising culturing the host cell as described herein under conditions suitable for gene expression is also provided.

[0826] In one aspect, the disclosure features a method of providing an antibody molecule described herein. The method includes: providing a PD-1 antigen (e.g., an antigen comprising at least a portion of a PD-1 epitope); obtaining an antibody molecule that specifically binds to the PD-1 polypeptide; and evaluating if the antibody molecule specifically binds to the PD-1 polypeptide, or evaluating efficacy of the antibody molecule in modulating, e.g., inhibiting, the activity of the PD-1. The method can further include administering the antibody molecule to a subject, e.g., a human or non-human animal.

[0827] In another aspect, the disclosure provides compositions, e.g., pharmaceutical compositions, which include a pharmaceutically acceptable carrier, excipient or stabilizer, and at least one of the therapeutic agents, e.g., anti-PD-1 antibody molecules described herein. In one embodiment, the composition, e.g., the pharmaceutical composition, includes a combination of the antibody molecule and one or more agents, e.g., a therapeutic agent or other antibody molecule, as described herein. In one embodiment, the antibody molecule is conjugated to a label or a therapeutic agent.

TABLE 6
Amino acid and nucleotide sequences for murine, chimeric and humanized anti-PD-1
antibody molecules. The antibody molecules include murine mAb BAP049, chimeric mAbs
BAP049-chi and BAP049-chi-Y, and humanized mAbs BAP049-hum01 to BAP049-hum16 and
BAP049-Clone-A to BAP049-Clone-E. The amino acid and nucleotide sequences of the heavy
and light chain CDRs, the heavy and light chain variable regions, and the heavy and
light chains are shown.
BAP049 HC

| | | |
|---|---|---|
| SEQ ID NO: 137 (Kabat) | HCDR1 | TYWMH |
| SEQ ID NO: 138 (Kabat) | HCDR2 | NIYPGTGGSNFDEKFKN |
| SEQ ID NO: 139 (Kabat) | HCDR3 | WTTGTGAY |
| SEQ ID NO: 140 (Chothia) | HCDR1 | GYTFTTY |
| SEQ ID NO: 141 (Chothia) | HCDR2 | YPGTGG |
| SEQ ID NO: 139 (Chothia) | HCDR3 | WTTGTGAY |
| SEQ ID NO: 142 | VH | QVQLQQPGSELVRPGASVKLSCKASGYTFTTYW |
| | | MHWVRQRPGQGLEWIGNIYPGTGGSNFDEKFKN |
| | | RTSLTVDTSSTTAYMHLASLTSEDSAVYYCTRW |
| | | TTGTGAYWGQGTLVTVSA |
| SEQ ID NO: 143 | DNA VH | CAGGTCCAGCTGCAGCAACCTGGGTCTGAGCTG |
| | | GTGAGGCCTGGAGCTTCAGTGAAGCTGTCCTGC |
| | | AAGGCGTCTGGCTACACATTCACCACTTACTGG |
| | | ATGCACTGGGTGAGGCAGAGGCCTGGACAAGGC |
| | | CTTGAGTGGATTGGAAATATTTATCCTGGTACT |
| | | GGTGGTTCTAACTTCGATGAGAAGTTCAAAAAC |
| | | AGGACCTCACTGACTGTAGACACATCCTCCACC |
| | | ACAGCCTACATGCACCTCGCCAGCCTGACATCT |
| | | GAGGACTCTGCGGTCTATTACTGTACAAGATGG |
| | | ACTACTGGGACGGGAGCTTATTGGGGCCAAGGG |
| | | ACTCTGGTCACTGTCTCTGCA |
| SEQ ID NO: 144 | VH | QVQLQQSGSELVRPGASVKLSCKASGYTFTTYW |
| | | MHWVRQRPGQGLEWIGNIYPGTGGSNFDEKFKN |
| | | RTSLTVDTSSTTAYMHLASLTSEDSAVYYCTRW |
| | | TTGTGAYWGQGTLVTVSA |
| SEQ ID NO: 145 | DNA VH | CAGGTCCAGCTGCAGCAGTCTGGGTCTGAGCTG |
| | | GTGAGGCCTGGAGCTTCAGTGAAGCTGTCCTGC |
| | | AAGGCGTCTGGCTACACATTCACCACTTACTGG |
| | | ATGCACTGGGTGAGGCAGAGGCCTGGACAAGGC |
| | | CTTGAGTGGATTGGAAATATTTATCCTGGTACT |
| | | GGTGGTTCTAACTTCGATGAGAAGTTCAAAAAC |
| | | AGGACCTCACTGACTGTAGACACATCCTCCACC |
| | | ACAGCCTACATGCACCTCGCCAGCCTGACATCT |
| | | GAGGACTCTGCGGTCTATTACTGTACAAGATGG |
| | | ACTACTGGGACGGGAGCTTATTGGGGCCAAGGG |
| | | ACTCTGGTCACTGTCTCTGCA |

BAP049 LC

| | | |
|---|---|---|
| SEQ ID NO: 146 (Kabat) | LCDR1 | KSSQSLLDSGNQKNFLT |
| SEQ ID NO: 147 (Kabat) | LCDR2 | WASTRES |
| SEQ ID NO: 148 (Kabat) | LCDR3 | QNDYSYPCT |
| SEQ ID NO: 149 (Chothia) | LCDR1 | SQSLLDSGNQKNF |
| SEQ ID NO: 150 (Chothia) | LCDR2 | WAS |
| SEQ ID NO: 151 (Chothia) | LCDR3 | DYSYPC |
| SEQ ID NO: 152 | VL | DIVMTQSPSSLTVTAGEKVTMSCKSSQSLLDSG |
| | | NQKNFLTWYQQKPGQPPKLLIFWASTRESGVPD |
| | | RFTGSGSVTDFTLTISSVQAEDLAVYYCQNDYS |
| | | YPCTFGGGTKLEIK |
| SEQ ID NO: 153 | DNA VL | GACATTGTGATGACCCAGTCTCCATCCTCCCTG |
| | | ACTGTGACAGCAGGAGAGAAGGTCACTATGAGC |
| | | TGCAAGTCCAGTCAGAGTCTGTTAGACAGTGGA |
| | | AATCAAAAGAACTTCTTGACCTGGTACCAGCAG |
| | | AAACCAGGGCAGCCTCCTAAACTGTTGATCTTC |
| | | TGGGCATCCACTAGGGAATCTGGGGTCCCTGAT |
| | | CGCTTCACAGGCAGTGGATCTGTAACAGATTTC |
| | | ACTCTCACCATCAGCAGTGTGCAGGCTGAAGAC |
| | | CTGGCAGTTTATTACTGTCAGAATGATTATAGT |
| | | TATCCGTGCACGTTCGGAGGGGGGACCAAGCTG |
| | | GAAATAAAA |

BAP049-chi HC

| | | |
|---|---|---|
| SEQ ID NO: 137 (Kabat) | HCDR1 | TYWMH |
| SEQ ID NO: 138 (Kabat) | HCDR2 | NIYPGTGGSNFDEKFKN |
| SEQ ID NO: 139 (Kabat) | HCDR3 | WTTGTGAY |
| SEQ ID NO: 140 (Chothia) | HCDR1 | GYTFTTY |
| SEQ ID NO: 141 (Chothia) | HCDR2 | YPGTGG |
| SEQ ID NO: 139 (Chothia) | HCDR3 | WTTGTGAY |
| SEQ ID NO: 154 | VH | QVQLQQPGSELVRPGASVKLSCKASGYTFTTYW |
| | | MHWVRQRPGQGLEWIGNIYPGTGGSNFDEKFKN |
| | | RTSLTVDTSSTTAYMHLASLTSEDSAVYYCTRW |
| | | TTGTGAYWGQGTTVTVSS |
| SEQ ID NO: 155 | DNA VH | CAGGTCCAGCTGCAGCAGCCTGGGTCTGAGCTG |
| | | GTGAGGCCTGGAGCTTCAGTGAAGCTGTCCTGC |
| | | AAGGCGTCTGGCTACACATTCACCACTTACTGG |
| | | ATGCACTGGGTGAGGCAGAGGCCTGGACAAGGC |
| | | CTTGAGTGGATTGGAAATATTTATCCTGGTACT |
| | | GGTGGTTCTAACTTCGATGAGAAGTTCAAAAAC |
| | | AGGACCTCACTGACTGTAGACACATCCTCCACC |
| | | ACAGCCTACATGCACCTCGCCAGCCTGACATCT |
| | | GAGGACTCTGCGGTCTATTACTGTACAAGATGG |
| | | ACTACTGGGACGGGAGCTTATTGGGGCCAGGGC |
| | | ACCACCGTGACCGTGTCCTCC |
| SEQ ID NO: 156 | HC | QVQLQQPGSELVRPGASVKLSCKASGYTFTTYW |
| | | MHWVRQRPGQGLEWIGNIYPGTGGSNFDEKFKN |
| | | RTSLTVDTSSTTAYMHLASLTSEDSAVYYCTRW |
| | | TTGTGAYWGQGTTVTVSSASTKGPSVFPLAPCS |
| | | RSTSESTAALGCLVKDYFPEPVTVSWNSGALTS |
| | | GVHTFPAVLQSSGLYSLSSVVTVPSSSLGTKTY |
| | | TCNVDHKPSNTKVDKRVESKYGPPCPPCPAPEF |
| | | LGGPSVFLFPPKPKDTLMISRTPEVTCVVVDVS |
| | | QEDPEVQFNWYVDGVEVHNAKTKPREEQFNSTY |
| | | RVVSVLTVLHQDWLNGKEYKCKVSNKGLPSSIE |
| | | KTISKAKGQPREPQVYTLPPSQEEMTKNQVSLT |
| | | CLVKGFYPSDIAVEWESNGQPENNYKTTPPVLD |
| | | SDGSFFLYSRLTVDKSRWQEGNVFSCSVMHEAL |
| | | HNHYTQKSLSLSLGK |
| SEQ ID NO: 157 | DNA HC | CAGGTCCAGCTGCAGCAGCCTGGGTCTGAGCTG |
| | | GTGAGGCCTGGAGCTTCAGTGAAGCTGTCCTGC |
| | | AAGGCGTCTGGCTACACATTCACCACTTACTGG |
| | | ATGCACTGGGTGAGGCAGAGGCCTGGACAAGGC |
| | | CTTGAGTGGATTGGAAATATTTATCCTGGTACT |
| | | GGTGGTTCTAACTTCGATGAGAAGTTCAAAAAC |
| | | AGGACCTCACTGACTGTAGACACATCCTCCACC |
| | | ACAGCCTACATGCACCTCGCCAGCCTGACATCT |
| | | GAGGACTCTGCGGTCTATTACTGTACAAGATGG |
| | | ACTACTGGGACGGGAGCTTATTGGGGCCAGGGC |
| | | ACCACCGTGACCGTGTCCTCCGCTTCCACCAAG |
| | | GGCCCATCCGTCTTCCCCCTGGCGCCCTGCTCC |
| | | AGGAGCACCTCCGAGAGCACAGCCGCCCTGGGC |
| | | TGCCTGGTCAAGGACTACTTCCCCGAACCGGTG |
| | | ACGGTGTCGTGGAACTCAGGCGCCCTGACCAGC |
| | | GGCGTGCACACCTTCCCGGCTGTCCTACAGTCC |
| | | TCAGGACTCTACTCCCTCAGCAGCGTGGTGACC |
| | | GTGCCCTCCAGCAGCTTGGGCACGAAGACCTAC |
| | | ACCTGCAACGTAGATCACAAGCCCAGCAACACC |
| | | AAGGTGGACAAGAGAGTTGAGTCCAAATATGGT |
| | | CCCCCATGCCCACCGTGCCCAGCACCTGAGTTC |
| | | CTGGGGGGACCATCAGTCTTCCTGTTCCCCCCA |
| | | AAACCCAAGGACACTCTCATGATCTCCCGGACC |
| | | CCTGAGGTCACGTGCGTGGTGGTGGACGTGAGC |
| | | CAGGAAGACCCCGAGGTCCAGTTCAACTGGTAC |
| | | GTGGATGGCGTGGAGGTGCATAATGCCAAGACA |
| | | AAGCCGCGGGAGGAGCAGTTCAACAGCACGTAC |
| | | CGTGTGGTCAGCGTCCTCACCGTCCTGCACCAG |
| | | GACTGGCTGAACGGCAAGGAGTACAAGTGCAAG |
| | | GTGTCCAACAAAGGCCTCCCGTCCTCCATCGAG |
| | | AAAACCATCTCCAAAGCCAAAGGGCAGCCCCGA |
| | | GAGCCACAGGTGTACACCCTGCCCCCATCCCAG |
| | | GAGGAGATGACCAAGAACCAGGTCAGCCTGACC |
| | | TGCCTGGTCAAAGGCTTCTACCCCAGCGACATC |
| | | GCCGTGGAGTGGGAGAGCAATGGGCAGCCGGAG |
| | | AACAACTACAAGACCACGCCTCCCGTGCTGGAC |
| | | TCCGACGGCTCCTTCTTCCTCTACAGCAGGCTA |
| | | ACCGTGGACAAGAGCAGGTGGCAGGAGGGGAAT |
| | | GTCTTCTCATGCTCCGTGATGCATGAGGCTCTG |
| | | CACAACCACTACACACAGAAGAGCCTCTCCCTG |
| | | TCTCTGGGTAAA |
| SEQ ID NO: 158 | VH | QVQLQQSGSELVRPGASVKLSCKASGYTFTTYW |
| | | MHWVRQRPGQGLEWIGNIYPGTGGSNFDEKFKN |
| | | RTSLTVDTSSTTAYMHLASLTSEDSAVYYCTRW |
| | | TTGTGAYWGQGTTVTVSS |
| SEQ ID NO: 159 | DNA VH | CAGGTCCAGCTGCAGCAGTCTGGGTCTGAGCTG |
| | | GTGAGGCCTGGAGCTTCAGTGAAGCTGTCCTGC |
| | | AAGGCGTCTGGCTACACATTCACCACTTACTGG |
| | | ATGCACTGGGTGAGGCAGAGGCCTGGACAAGGC |
| | | CTTGAGTGGATTGGAAATATTTATCCTGGTACT |
| | | GGTGGTTCTAACTTCGATGAGAAGTTCAAAAAC |
| | | AGGACCTCACTGACTGTAGACACATCCTCCACC |
| | | ACAGCCTACATGCACCTCGCCAGCCTGACATCT |
| | | GAGGACTCTGCGGTCTATTACTGTACAAGATGG |
| | | ACTACTGGGACGGGAGCTTATTGGGGCCAGGGC |
| | | ACCACCGTGACCGTGTCCTCC |
| SEQ ID NO: 160 | HC | QVQLQQSGSELVRPGASVKLSCKASGYTFTTYW |
| | | MHWVRQRPGQGLEWIGNIYPGTGGSNFDEKFKN |
| | | RTSLTVDTSSTTAYMHLASLTSEDSAVYYCTRW |
| | | TTGTGAYWGQGTTVTVSSASTKGPSVFPLAPCS |
| | | RSTSESTAALGCLVKDYFPEPVTVSWNSGALTS |
| | | GVHTFPAVLQSSGLYSLSSVVTVPSSSLGTKTY |
| | | TCNVDHKPSNTKVDKRVESKYGPPCPPCPAPEF |
| | | LGGPSVFLFPPKPKDTLMISRTPEVTCVVVDVS |
| | | QEDPEVQFNWYVDGVEVHNAKTKPREEQFNSTY |
| | | RVVSVLTVLHQDWLNGKEYKCKVSNKGLPSSIE |
| | | KTISKAKGQPREPQVYTLPPSQEEMTKNQVSLT |
| | | CLVKGFYPSDIAVEWESNGQPENNYKTTPPVLD |
| | | SDGSFFLYSRLTVDKSRWQEGNVFSCSVMHEAL |
| | | HNHYTQKSLSLSLGK |
| SEQ ID NO: 161 | DNA HC | CAGGTCCAGCTGCAGCAGTCTGGGTCTGAGCTG |
| | | GTGAGGCCTGGAGCTTCAGTGAAGCTGTCCTGC |
| | | AAGGCGTCTGGCTACACATTCACCACTTACTGG |
| | | ATGCACTGGGTGAGGCAGAGGCCTGGACAAGGC |
| | | CTTGAGTGGATTGGAAATATTTATCCTGGTACT |
| | | GGTGGTTCTAACTTCGATGAGAAGTTCAAAAAC |
| | | AGGACCTCACTGACTGTAGACACATCCTCCACC |
| | | ACAGCCTACATGCACCTCGCCAGCCTGACATCT |
| | | GAGGACTCTGCGGTCTATTACTGTACAAGATGG |
| | | ACTACTGGGACGGGAGCTTATTGGGGCCAGGGC |
| | | ACCACCGTGACCGTGTCCTCCGCTTCCACCAAG |
| | | GGCCCATCCGTCTTCCCCCTGGCGCCCTGCTCC |
| | | AGGAGCACCTCCGAGAGCACAGCCGCCCTGGGC |
| | | TGCCTGGTCAAGGACTACTTCCCCGAACCGGTG |
| | | ACGGTGTCGTGGAACTCAGGCGCCCTGACCAGC |
| | | GGCGTGCACACCTTCCCGGCTGTCCTACAGTCC |
| | | TCAGGACTCTACTCCCTCAGCAGCGTGGTGACC |
| | | GTGCCCTCCAGCAGCTTGGGCACGAAGACCTAC |
| | | ACCTGCAACGTAGATCACAAGCCCAGCAACACC |
| | | AAGGTGGACAAGAGAGTTGAGTCCAAATATGGT |
| | | CCCCCATGCCCACCGTGCCCAGCACCTGAGTTC |
| | | CTGGGGGGACCATCAGTCTTCCTGTTCCCCCCA |
| | | AAACCCAAGGACACTCTCATGATCTCCCGGACC |
| | | CCTGAGGTCACGTGCGTGGTGGTGGACGTGAGC |
| | | CAGGAAGACCCCGAGGTCCAGTTCAACTGGTAC |
| | | GTGGATGGCGTGGAGGTGCATAATGCCAAGACA |
| | | AAGCCGCGGGAGGAGCAGTTCAACAGCACGTAC |
| | | CGTGTGGTCAGCGTCCTCACCGTCCTGCACCAG |
| | | GACTGGCTGAACGGCAAGGAGTACAAGTGCAAG |
| | | GTGTCCAACAAAGGCCTCCCGTCCTCCATCGAG |
| | | AAAACCATCTCCAAAGCCAAAGGGCAGCCCCGA |
| | | GAGCCACAGGTGTACACCCTGCCCCCATCCCAG |
| | | GAGGAGATGACCAAGAACCAGGTCAGCCTGACC |
| | | TGCCTGGTCAAAGGCTTCTACCCCAGCGACATC |
| | | GCCGTGGAGTGGGAGAGCAATGGGCAGCCGGAG |
| | | AACAACTACAAGACCACGCCTCCCGTGCTGGAC |
| | | TCCGACGGCTCCTTCTTCCTCTACAGCAGGCTA |
| | | ACCGTGGACAAGAGCAGGTGGCAGGAGGGGAAT |
| | | GTCTTCTCATGCTCCGTGATGCATGAGGCTCTG |
| | | CACAACCACTACACACAGAAGAGCCTCTCCCTG |
| | | TCTCTGGGTAAA |

BAP049-chi LC

| | | |
|---|---|---|
| SEQ ID NO: 146 (Kabat) | LCDR1 | KSSQSLLDSGNQKNFLT |
| SEQ ID NO: 147 (Kabat) | LCDR2 | WASTRES |
| SEQ ID NO: 148 (Kabat) | LCDR3 | QNDYSYPCT |
| SEQ ID NO: 149 (Chothia) | LCDR1 | SQSLLDSGNQKNF |
| SEQ ID NO: 150 (Chothia) | LCDR2 | WAS |
| SEQ ID NO: 151 (Chothia) | LCDR3 | DYSYPC |
| SEQ ID NO: 162 | VL | DIVMTQSPSSLTVTAGEKVTMSCKSSQSLLDSG |
| | | NQKNFLTWYQQKPGQPPKLLIFWASTRESGVPD |
| | | RFTGSGSVTDFTLTISSVQAEDLAVYYCQNDYS |
| | | YPCTFGQGTKVEIK |
| SEQ ID NO: 163 | DNA VL | GACATTGTGATGACCCAGTCTCCATCCTCCCTG |
| | | ACTGTGACAGCAGGAGAGAAGGTCACTATGAGC |
| | | TGCAAGTCCAGTCAGAGTCTGTTAGACAGTGGA |
| | | AATCAAAAGAACTTCTTGACCTGGTACCAGCAG |
| | | AAACCAGGGCAGCCTCCTAAACTGTTGATCTTC |
| | | TGGGCATCCACTAGGGAATCTGGGGTCCCTGAT |
| | | CGCTTCACAGGCAGTGGATCTGTAACAGATTTC |
| | | ACTCTCACCATCAGCAGTGTGCAGGCTGAAGAC |
| | | CTGGCAGTTTATTACTGTCAGAATGATTATAGT |
| | | TATCCGTGCACGTTCGGCCAAGGGACCAAGGTG |
| | | GAAATCAAA |
| SEQ ID NO: 164 | LC | DIVMTQSPSSLTVTAGEKVTMSCKSSQSLLDSG |
| | | NQKNFLTWYQQKPGQPPKLLIFWASTRESGVPD |
| | | RFTGSGSVTDFTLTISSVQAEDLAVYYCQNDYS |
| | | YPCTFGQGTKVEIKRTVAAPSVFIFPPSDEQLK |
| | | SGTASVVCLLNNFYPREAKVQWKVDNALQSGNS |
| | | QESVTEQDSKDSTYSLSSTLTLSKADYEKHKVY |
| | | ACEVTHQGLSSPVTKSFNRGEC |
| SEQ ID NO: 165 | DNA LC | GACATTGTGATGACCCAGTCTCCATCCTCCCTG |
| | | ACTGTGACAGCAGGAGAGAAGGTCACTATGAGC |
| | | TGCAAGTCCAGTCAGAGTCTGTTAGACAGTGGA |
| | | AATCAAAAGAACTTCTTGACCTGGTACCAGCAG |
| | | AAACCAGGGCAGCCTCCTAAACTGTTGATCTTC |
| | | TGGGCATCCACTAGGGAATCTGGGGTCCCTGAT |
| | | CGCTTCACAGGCAGTGGATCTGTAACAGATTTC |
| | | ACTCTCACCATCAGCAGTGTGCAGGCTGAAGAC |
| | | CTGGCAGTTTATTACTGTCAGAATGATTATAGT |
| | | TATCCGTGCACGTTCGGCCAAGGGACCAAGGTG |
| | | GAAATCAAACGTACGGTGGCTGCACCATCTGTC |
| | | TTCATCTTCCCGCCATCTGATGAGCAGTTGAAA |
| | | TCTGGAACTGCCTCTGTTGTGTGCCTGCTGAAT |
| | | AACTTCTATCCCAGAGAGGCCAAAGTACAGTGG |
| | | AAGGTGGATAACGCCCTCCAATCGGGTAACTCC |
| | | CAGGAGAGTGTCACAGAGCAGGACAGCAAGGAC |
| | | AGCACCTACAGCCTCAGCAGCACCCTGACGCTG |
| | | AGCAAAGCAGACTACGAGAAACACAAAGTCTAC |
| | | GCCTGCGAAGTCACCCATCAGGGCCTGAGCTCG |
| | | CCCGTCACAAAGAGCTTCAACAGGGGAGAGTGT |

BAP049-chi-Y HC

| | | |
|---|---|---|
| SEQ ID NO: 137 (Kabat) | HCDR1 | TYWMH |
| SEQ ID NO: 138 (Kabat) | HCDR2 | NIYPGTGGSNFDEKFKN |
| SEQ ID NO: 139 (Kabat) | HCDR3 | WTTGTGAY |
| SEQ ID NO: 140 (Chothia) | HCDR1 | GYTFTTY |
| SEQ ID NO: 141 (Chothia) | HCDR2 | YPGTGG |
| SEQ ID NO: 139 (Chothia) | HCDR3 | WTTGTGAY |
| SEQ ID NO: 154 | VH | QVQLQQPGSELVRPGASVKLSCKASGYTFTTYW |
| | | MHWVRQRPGQGLEWIGNIYPGTGGSNFDEKFKN |
| | | RTSLTVDTSSTTAYMHLASLTSEDSAVYYCTRW |
| | | TTGTGAYWGQGTTVTVSS |
| SEQ ID NO: 155 | DNA VH | CAGGTCCAGCTGCAGCAGCCTGGGTCTGAGCTG |
| | | GTGAGGCCTGGAGCTTCAGTGAAGCTGTCCTGC |
| | | AAGGCGTCTGGCTACACATTCACCACTTACTGG |
| | | ATGCACTGGGTGAGGCAGAGGCCTGGACAAGGC |
| | | CTTGAGTGGATTGGAAATATTTATCCTGGTACT |
| | | GGTGGTTCTAACTTCGATGAGAAGTTCAAAAAC |
| | | AGGACCTCACTGACTGTAGACACATCCTCCACC |
| | | ACAGCCTACATGCACCTCGCCAGCCTGACATCT |
| | | GAGGACTCTGCGGTCTATTACTGTACAAGATGG |
| | | ACTACTGGGACGGGAGCTTATTGGGGCCAGGGC |
| | | ACCACCGTGACCGTGTCCTCC |
| SEQ ID NO: 156 | HC | QVQLQQPGSELVRPGASVKLSCKASGYTFTTYW |
| | | MHWVRQRPGQGLEWIGNIYPGTGGSNFDEKFKN |
| | | RTSLTVDTSSTTAYMHLASLTSEDSAVYYCTRW |
| | | TTGTGAYWGQGTTVTVSSASTKGPSVFPLAPCS |
| | | RSTSESTAALGCLVKDYFPEPVTVSWNSGALTS |
| | | GVHTFPAVLQSSGLYSLSSVVTVPSSSLGTKTY |
| | | TCNVDHKPSNTKVDKRVESKYGPPCPPCPAPEF |
| | | LGGPSVFLFPPKPKDTLMISRTPEVTCVVVDVS |
| | | QEDPEVQFNWYVDGVEVHNAKTKPREEQFNSTY |
| | | RVVSVLTVLHQDWLNGKEYKCKVSNKGLPSSIE |
| | | KTISKAKGQPREPQVYTLPPSQEEMTKNQVSLT |
| | | CLVKGFYPSDIAVEWESNGQPENNYKTTPPVLD |
| | | SDGSFFLYSRLTVDKSRWQEGNVFSCSVMHEAL |
| | | HNHYTQKSLSLSLGK |
| SEQ ID NO: 157 | DNA HC | CAGGTCCAGCTGCAGCAGCCTGGGTCTGAGCTG |
| | | GTGAGGCCTGGAGCTTCAGTGAAGCTGTCCTGC |
| | | AAGGCGTCTGGCTACACATTCACCACTTACTGG |
| | | ATGCACTGGGTGAGGCAGAGGCCTGGACAAGGC |
| | | CTTGAGTGGATTGGAAATATTTATCCTGGTACT |
| | | GGTGGTTCTAACTTCGATGAGAAGTTCAAAAAC |
| | | AGGACCTCACTGACTGTAGACACATCCTCCACC |
| | | ACAGCCTACATGCACCTCGCCAGCCTGACATCT |
| | | GAGGACTCTGCGGTCTATTACTGTACAAGATGG |
| | | ACTACTGGGACGGGAGCTTATTGGGGCCAGGGC |
| | | ACCACCGTGACCGTGTCCTCCGCTTCCACCAAG |
| | | GGCCCATCCGTCTTCCCCCTGGCGCCCTGCTCC |
| | | AGGAGCACCTCCGAGAGCACAGCCGCCCTGGGC |
| | | TGCCTGGTCAAGGACTACTTCCCCGAACCGGTG |
| | | ACGGTGTCGTGGAACTCAGGCGCCCTGACCAGC |
| | | GGCGTGCACACCTTCCCGGCTGTCCTACAGTCC |
| | | TCAGGACTCTACTCCCTCAGCAGCGTGGTGACC |
| | | GTGCCCTCCAGCAGCTTGGGCACGAAGACCTAC |
| | | ACCTGCAACGTAGATCACAAGCCCAGCAACACC |
| | | AAGGTGGACAAGAGAGTTGAGTCCAAATATGGT |
| | | CCCCCATGCCCACCGTGCCCAGCACCTGAGTTC |
| | | CTGGGGGGACCATCAGTCTTCCTGTTCCCCCCA |
| | | AAACCCAAGGACACTCTCATGATCTCCCGGACC |
| | | CCTGAGGTCACGTGCGTGGTGGTGGACGTGAGC |
| | | CAGGAAGACCCCGAGGTCCAGTTCAACTGGTAC |
| | | GTGGATGGCGTGGAGGTGCATAATGCCAAGACA |
| | | AAGCCGCGGGAGGAGCAGTTCAACAGCACGTAC |
| | | CGTGTGGTCAGCGTCCTCACCGTCCTGCACCAG |
| | | GACTGGCTGAACGGCAAGGAGTACAAGTGCAAG |
| | | GTGTCCAACAAAGGCCTCCCGTCCTCCATCGAG |
| | | AAAACCATCTCCAAAGCCAAAGGGCAGCCCCGA |
| | | GAGCCACAGGTGTACACCCTGCCCCCATCCCAG |
| | | GAGGAGATGACCAAGAACCAGGTCAGCCTGACC |
| | | TGCCTGGTCAAAGGCTTCTACCCCAGCGACATC |
| | | GCCGTGGAGTGGGAGAGCAATGGGCAGCCGGAG |
| | | AACAACTACAAGACCACGCCTCCCGTGCTGGAC |
| | | TCCGACGGCTCCTTCTTCCTCTACAGCAGGCTA |
| | | ACCGTGGACAAGAGCAGGTGGCAGGAGGGGAAT |
| | | GTCTTCTCATGCTCCGTGATGCATGAGGCTCTG |
| | | CACAACCACTACACACAGAAGAGCCTCTCCCTG |
| | | TCTCTGGGTAAA |
| SEQ ID NO: 158 | VH | QVQLQQSGSELVRPGASVKLSCKASGYTFTTYW |
| | | MHWVRQRPGQGLEWIGNIYPGTGGSNFDEKFKN |
| | | RTSLTVDTSSTTAYMHLASLTSEDSAVYYCTRW |
| | | TTGTGAYWGQGTTVTVSS |
| SEQ ID NO: 159 | DNA VH | CAGGTCCAGCTGCAGCAGTCTGGGTCTGAGCTG |
| | | GTGAGGCCTGGAGCTTCAGTGAAGCTGTCCTGC |
| | | AAGGCGTCTGGCTACACATTCACCACTTACTGG |
| | | ATGCACTGGGTGAGGCAGAGGCCTGGACAAGGC |
| | | CTTGAGTGGATTGGAAATATTTATCCTGGTACT |
| | | GGTGGTTCTAACTTCGATGAGAAGTTCAAAAAC |
| | | AGGACCTCACTGACTGTAGACACATCCTCCACC |
| | | ACAGCCTACATGCACCTCGCCAGCCTGACATCT |
| | | GAGGACTCTGCGGTCTATTACTGTACAAGATGG |
| | | ACTACTGGGACGGGAGCTTATTGGGGCCAGGGC |
| | | ACCACCGTGACCGTGTCCTCC |
| SEQ ID NO: 160 | HC | QVQLQQSGSELVRPGASVKLSCKASGYTFTTYW |
| | | MHWVRQRPGQGLEWIGNIYPGTGGSNFDEKFKN |
| | | RTSLTVDTSSTTAYMHLASLTSEDSAVYYCTRW |
| | | TTGTGAYWGQGTTVTVSSASTKGPSVFPLAPCS |
| | | RSTSESTAALGCLVKDYFPEPVTVSWNSGALTS |
| | | GVHTFPAVLQSSGLYSLSSVVTVPSSSLGTKTY |
| | | TCNVDHKPSNTKVDKRVESKYGPPCPPCPAPEF |
| | | LGGPSVFLFPPKPKDTLMISRTPEVTCVVVDVS |
| | | QEDPEVQFNWYVDGVEVHNAKTKPREEQFNSTY |
| | | RVVSVLTVLHQDWLNGKEYKCKVSNKGLPSSIE |
| | | KTISKAKGQPREPQVYTLPPSQEEMTKNQVSLT |
| | | CLVKGFYPSDIAVEWESNGQPENNYKTTPPVLD |
| | | SDGSFFLYSRLTVDKSRWQEGNVFSCSVMHEAL |
| | | HNHYTQKSLSLSLGK |
| SEQ ID NO: 161 | DNA HC | CAGGTCCAGCTGCAGCAGTCTGGGTCTGAGCTG |
| | | GTGAGGCCTGGAGCTTCAGTGAAGCTGTCCTGC |
| | | AAGGCGTCTGGCTACACATTCACCACTTACTGG |
| | | ATGCACTGGGTGAGGCAGAGGCCTGGACAAGGC |
| | | CTTGAGTGGATTGGAAATATTTATCCTGGTACT |
| | | GGTGGTTCTAACTTCGATGAGAAGTTCAAAAAC |
| | | AGGACCTCACTGACTGTAGACACATCCTCCACC |
| | | ACAGCCTACATGCACCTCGCCAGCCTGACATCT |
| | | GAGGACTCTGCGGTCTATTACTGTACAAGATGG |
| | | ACTACTGGGACGGGAGCTTATTGGGGCCAGGGC |
| | | ACCACCGTGACCGTGTCCTCCGCTTCCACCAAG |
| | | GGCCCATCCGTCTTCCCCCTGGCGCCCTGCTCC |
| | | AGGAGCACCTCCGAGAGCACAGCCGCCCTGGGC |
| | | TGCCTGGTCAAGGACTACTTCCCCGAACCGGTG |
| | | ACGGTGTCGTGGAACTCAGGCGCCCTGACCAGC |
| | | GGCGTGCACACCTTCCCGGCTGTCCTACAGTCC |
| | | TCAGGACTCTACTCCCTCAGCAGCGTGGTGACC |
| | | GTGCCCTCCAGCAGCTTGGGCACGAAGACCTAC |
| | | ACCTGCAACGTAGATCACAAGCCCAGCAACACC |
| | | AAGGTGGACAAGAGAGTTGAGTCCAAATATGGT |
| | | CCCCCATGCCCACCGTGCCCAGCACCTGAGTTC |
| | | CTGGGGGGACCATCAGTCTTCCTGTTCCCCCCA |
| | | AAACCCAAGGACACTCTCATGATCTCCCGGACC |
| | | CCTGAGGTCACGTGCGTGGTGGTGGACGTGAGC |
| | | CAGGAAGACCCCGAGGTCCAGTTCAACTGGTAC |
| | | GTGGATGGCGTGGAGGTGCATAATGCCAAGACA |
| | | AAGCCGCGGGAGGAGCAGTTCAACAGCACGTAC |
| | | CGTGTGGTCAGCGTCCTCACCGTCCTGCACCAG |
| | | GACTGGCTGAACGGCAAGGAGTACAAGTGCAAG |
| | | GTGTCCAACAAAGGCCTCCCGTCCTCCATCGAG |
| | | AAAACCATCTCCAAAGCCAAAGGGCAGCCCCGA |
| | | GAGCCACAGGTGTACACCCTGCCCCCATCCCAG |
| | | GAGGAGATGACCAAGAACCAGGTCAGCCTGACC |
| | | TGCCTGGTCAAAGGCTTCTACCCCAGCGACATC |
| | | GCCGTGGAGTGGGAGAGCAATGGGCAGCCGGAG |
| | | AACAACTACAAGACCACGCCTCCCGTGCTGGAC |
| | | TCCGACGGCTCCTTCTTCCTCTACAGCAGGCTA |
| | | ACCGTGGACAAGAGCAGGTGGCAGGAGGGGAAT |
| | | GTCTTCTCATGCTCCGTGATGCATGAGGCTCTG |
| | | CACAACCACTACACACAGAAGAGCCTCTCCCTG |
| | | TCTCTGGGTAAA |

BAP049-chi-Y LC

| | | |
|---|---|---|
| SEQ ID NO: 146 (Kabat) | LCDR1 | KSSQSLLDSGNQKNFLT |
| SEQ ID NO: 147 (Kabat) | LCDR2 | WASTRES |
| SEQ ID NO: 166 (Kabat) | LCDR3 | QNDYSYPYT |
| SEQ ID NO: 149 (Chothia) | LCDR1 | SQSLLDSGNQKNF |
| SEQ ID NO: 150 (Chothia) | LCDR2 | WAS |
| SEQ ID NO: 167 (Chothia) | LCDR3 | DYSYPY |
| SEQ ID NO: 168 | VL | DIVMTQSPSSLTVTAGEKVTMSCKSSQSLLDSG |
| | | NQKNFLTWYQQKPGQPPKLLIFWASTRESGVPD |
| | | RFTGSGSVTDFTLTISSVQAEDLAVYYCQNDYS |
| | | YPYTFGQGTKVEIK |
| SEQ ID NO: 169 | DNA VL | GACATTGTGATGACCCAGTCTCCATCCTCCCTG |
| | | ACTGTGACAGCAGGAGAGAAGGTCACTATGAGC |
| | | TGCAAGTCCAGTCAGAGTCTGTTAGACAGTGGA |
| | | AATCAAAAGAACTTCTTGACCTGGTACCAGCAG |
| | | AAACCAGGGCAGCCTCCTAAACTGTTGATCTTC |
| | | TGGGCATCCACTAGGGAATCTGGGGTCCCTGAT |
| | | CGCTTCACAGGCAGTGGATCTGTAACAGATTTC |
| | | ACTCTCACCATCAGCAGTGTGCAGGCTGAAGAC |
| | | CTGGCAGTTTATTACTGTCAGAATGATTATAGT |
| | | TATCCGTACACGTTCGGCCAAGGGACCAAGGTG |
| | | GAAATCAAA |
| SEQ ID NO: 170 | LC | DIVMTQSPSSLTVTAGEKVTMSCKSSQSLLDSG |
| | | NQKNFLTWYQQKPGQPPKLLIFWASTRESGVPD |
| | | RFTGSGSVTDFTLTISSVQAEDLAVYYCQNDYS |
| | | YPYTFGQGTKVEIKRTVAAPSVFIFPPSDEQLK |
| | | SGTASVVCLLNNFYPREAKVQWKVDNALQSGNS |
| | | QESVTEQDSKDSTYSLSSTLTLSKADYEKHKVY |
| | | ACEVTHQGLSSPVTKSFNRGEC |
| SEQ ID NO: 171 | DNA LC | GACATTGTGATGACCCAGTCTCCATCCTCCCTG |
| | | ACTGTGACAGCAGGAGAGAAGGTCACTATGAGC |
| | | TGCAAGTCCAGTCAGAGTCTGTTAGACAGTGGA |
| | | AATCAAAAGAACTTCTTGACCTGGTACCAGCAG |
| | | AAACCAGGGCAGCCTCCTAAACTGTTGATCTTC |
| | | TGGGCATCCACTAGGGAATCTGGGGTCCCTGAT |
| | | CGCTTCACAGGCAGTGGATCTGTAACAGATTTC |
| | | ACTCTCACCATCAGCAGTGTGCAGGCTGAAGAC |
| | | CTGGCAGTTTATTACTGTCAGAATGATTATAGT |
| | | TATCCGTACACGTTCGGCCAAGGGACCAAGGTG |
| | | GAAATCAAACGTACGGTGGCTGCACCATCTGTC |
| | | TTCATCTTCCCGCCATCTGATGAGCAGTTGAAA |
| | | TCTGGAACTGCCTCTGTTGTGTGCCTGCTGAAT |
| | | AACTTCTATCCCAGAGAGGCCAAAGTACAGTGG |
| | | AAGGTGGATAACGCCCTCCAATCGGGTAACTCC |
| | | CAGGAGAGTGTCACAGAGCAGGACAGCAAGGAC |
| | | AGCACCTACAGCCTCAGCAGCACCCTGACGCTG |
| | | AGCAAAGCAGACTACGAGAAACACAAAGTCTAC |
| | | GCCTGCGAAGTCACCCATCAGGGCCTGAGCTCG |
| | | CCCGTCACAAAGAGCTTCAACAGGGGAGAGTGT |

BAP049-hum01 HC

| | | |
|---|---|---|
| SEQ ID NO: 137 (Kabat) | HCDR1 | TYWMH |
| SEQ ID NO: 138 (Kabat) | HCDR2 | NIYPGTGGSNFDEKFKN |
| SEQ ID NO: 139 (Kabat) | HCDR3 | WTTGTGAY |
| SEQ ID NO: 140 (Chothia) | HCDR1 | GYTFTTY |
| SEQ ID NO: 141 (Chothia) | HCDR2 | YPGTGG |
| SEQ ID NO: 139 (Chothia) | HCDR3 | WTTGTGAY |
| SEQ ID NO: 172 | VH | EVQLVQSGAEVKKPGESLRISCKGSGYTFTTYW |
| | | MHWVRQATGQGLEWMGNIYPGTGGSNFDEKFKN |
| | | RVTITADKSTSTAYMELSSLRSEDTAVYYCTRW |
| | | TTGTGAYWGQGTTVTVSS |
| SEQ ID NO: 173 | DNA VH | GAAGTGCAGCTGGTGCAGTCTGGAGCAGAGGTG |
| | | AAAAAGCCCGGGGAGTCTCTGAGGATCTCCTGT |
| | | AAGGGTTCTGGCTACACATTCACCACTTACTGG |
| | | ATGCACTGGGTGCGACAGGCCACTGGACAAGGG |
| | | CTTGAGTGGATGGGTAATATTTATCCTGGTACT |
| | | GGTGGTTCTAACTTCGATGAGAAGTTCAAGAAC |
| | | AGAGTCACGATTACCGCGGACAAATCCACGAGC |
| | | ACAGCCTACATGGAGCTGAGCAGCCTGAGATCT |
| | | GAGGACACGGCCGTGTATTACTGTACAAGATGG |
| | | ACTACTGGGACGGGAGCTTATTGGGGCCAGGGC |
| | | ACCACCGTGACCGTGTCCTCC |
| SEQ ID NO: 174 | HC | EVQLVQSGAEVKKPGESLRISCKGSGYTFTTYW |
| | | MHWVRQATGQGLEWMGNIYPGTGGSNFDEKFKN |
| | | RVTITADKSTSTAYMELSSLRSEDTAVYYCTRW |
| | | TTGTGAYWGQGTTVTVSSASTKGPSVFPLAPCS |
| | | RSTSESTAALGCLVKDYFPEPVTVSWNSGALTS |
| | | GVHTFPAVLQSSGLYSLSSVVTVPSSSLGTKTY |
| | | TCNVDHKPSNTKVDKRVESKYGPPCPPCPAPEF |
| | | LGGPSVFLFPPKPKDTLMISRTPEVTCVVVDVS |
| | | QEDPEVQFNWYVDGVEVHNAKTKPREEQFNSTY |
| | | RVVSVLTVLHQDWLNGKEYKCKVSNKGLPSSIE |
| | | KTISKAKGQPREPQVYTLPPSQEEMTKNQVSLT |
| | | CLVKGFYPSDIAVEWESNGQPENNYKTTPPVLD |
| | | SDGSFFLYSRLTVDKSRWQEGNVFSCSVMHEAL |
| | | HNHYTQKSLSLSLGK |
| SEQ ID NO: 175 | DNA HC | GAAGTGCAGCTGGTGCAGTCTGGAGCAGAGGTG |
| | | AAAAAGCCCGGGGAGTCTCTGAGGATCTCCTGT |
| | | AAGGGTTCTGGCTACACATTCACCACTTACTGG |
| | | ATGCACTGGGTGCGACAGGCCACTGGACAAGGG |
| | | CTTGAGTGGATGGGTAATATTTATCCTGGTACT |
| | | GGTGGTTCTAACTTCGATGAGAAGTTCAAGAAC |
| | | AGAGTCACGATTACCGCGGACAAATCCACGAGC |
| | | ACAGCCTACATGGAGCTGAGCAGCCTGAGATCT |
| | | GAGGACACGGCCGTGTATTACTGTACAAGATGG |
| | | ACTACTGGGACGGGAGCTTATTGGGGCCAGGGC |
| | | ACCACCGTGACCGTGTCCTCCGCTTCCACCAAG |
| | | GGCCCATCCGTCTTCCCCCTGGCGCCCTGCTCC |
| | | AGGAGCACCTCCGAGAGCACAGCCGCCCTGGGC |
| | | TGCCTGGTCAAGGACTACTTCCCCGAACCGGTG |
| | | ACGGTGTCGTGGAACTCAGGCGCCCTGACCAGC |
| | | GGCGTGCACACCTTCCCGGCTGTCCTACAGTCC |
| | | TCAGGACTCTACTCCCTCAGCAGCGTGGTGACC |
| | | GTGCCCTCCAGCAGCTTGGGCACGAAGACCTAC |
| | | ACCTGCAACGTAGATCACAAGCCCAGCAACACC |
| | | AAGGTGGACAAGAGAGTTGAGTCCAAATATGGT |
| | | CCCCCATGCCCACCGTGCCCAGCACCTGAGTTC |
| | | CTGGGGGGACCATCAGTCTTCCTGTTCCCCCCA |
| | | AAACCCAAGGACACTCTCATGATCTCCCGGACC |
| | | CCTGAGGTCACGTGCGTGGTGGTGGACGTGAGC |
| | | CAGGAAGACCCCGAGGTCCAGTTCAACTGGTAC |
| | | GTGGATGGCGTGGAGGTGCATAATGCCAAGACA |
| | | AAGCCGCGGGAGGAGCAGTTCAACAGCACGTAC |
| | | CGTGTGGTCAGCGTCCTCACCGTCCTGCACCAG |
| | | GACTGGCTGAACGGCAAGGAGTACAAGTGCAAG |
| | | GTGTCCAACAAAGGCCTCCCGTCCTCCATCGAG |
| | | AAAACCATCTCCAAAGCCAAAGGGCAGCCCCGA |
| | | GAGCCACAGGTGTACACCCTGCCCCCATCCCAG |
| | | GAGGAGATGACCAAGAACCAGGTCAGCCTGACC |
| | | TGCCTGGTCAAAGGCTTCTACCCCAGCGACATC |
| | | GCCGTGGAGTGGGAGAGCAATGGGCAGCCGGAG |
| | | AACAACTACAAGACCACGCCTCCCGTGCTGGAC |
| | | TCCGACGGCTCCTTCTTCCTCTACAGCAGGCTA |
| | | ACCGTGGACAAGAGCAGGTGGCAGGAGGGGAAT |
| | | GTCTTCTCATGCTCCGTGATGCATGAGGCTCTG |
| | | CACAACCACTACACACAGAAGAGCCTCTCCCTG |
| | | TCTCTGGGTAAA |

BAP049-hum01 LC

| | | |
|---|---|---|
| SEQ ID NO: 146 (Kabat) | LCDR1 | KSSQSLLDSGNQKNFLT |
| SEQ ID NO: 147 (Kabat) | LCDR2 | WASTRES |
| SEQ ID NO: 166 (Kabat) | LCDR3 | QNDYSYPYT |
| SEQ ID NO: 149 (Chothia) | LCDR1 | SQSLLDSGNQKNF |
| SEQ ID NO: 150 (Chothia) | LCDR2 | WAS |
| SEQ ID NO: 167 (Chothia) | LCDR3 | DYSYPY |
| SEQ ID NO: 176 | VL | EIVLTQSPATLSLSPGERATLSCKSSQSLLDSG |
| | | NQKNFLTWYQQKPGQAPRLLIYWASTRESGVPS |
| | | RFSGSGSGTEFTLTISSLQPDDFATYYCQNDYS |
| | | YPYTFGQGTKVEIK |
| SEQ ID NO: 177 | DNA VL | GAAATTGTGTTGACACAGTCTCCAGCCACCCTG |
| | | TCTTTGTCTCCAGGGGAAAGAGCCACCCTCTCC |
| | | TGCAAGTCCAGTCAGAGTCTGTTAGACAGTGGA |
| | | AATCAAAAGAACTTCTTGACCTGGTACCAGCAG |
| | | AAACCTGGCCAGGCTCCCAGGCTCCTCATCTAT |
| | | TGGGCATCCACTAGGGAATCTGGGGTCCCATCA |
| | | AGGTTCAGCGGCAGTGGATCTGGGACAGAATTC |
| | | ACTCTCACCATCAGCAGCCTGCAGCCTGATGAT |
| | | TTTGCAACTTATTACTGTCAGAATGATTATAGT |
| | | TATCCGTACACGTTCGGCCAAGGGACCAAGGTG |
| | | GAAATCAAA |
| SEQ ID NO: 178 | LC | EIVLTQSPATLSLSPGERATLSCKSSQSLLDSG |
| | | NQKNFLTWYQQKPGQAPRLLIYWASTRESGVPS |
| | | RFSGSGSGTEFTLTISSLQPDDFATYYCQNDYS |
| | | YPYTFGQGTKVEIKRTVAAPSVFIFPPSDEQLK |
| | | SGTASVVCLLNNFYPREAKVQWKVDNALQSGNS |
| | | QESVTEQDSKDSTYSLSSTLTLSKADYEKHKVY |
| | | ACEVTHQGLSSPVTKSFNRGEC |
| SEQ ID NO: 179 | DNA LC | GAAATTGTGTTGACACAGTCTCCAGCCACCCTG |
| | | TCTTTGTCTCCAGGGGAAAGAGCCACCCTCTCC |
| | | TGCAAGTCCAGTCAGAGTCTGTTAGACAGTGGA |
| | | AATCAAAAGAACTTCTTGACCTGGTACCAGCAG |
| | | AAACCTGGCCAGGCTCCCAGGCTCCTCATCTAT |
| | | TGGGCATCCACTAGGGAATCTGGGGTCCCATCA |
| | | AGGTTCAGCGGCAGTGGATCTGGGACAGAATTC |
| | | ACTCTCACCATCAGCAGCCTGCAGCCTGATGAT |
| | | TTTGCAACTTATTACTGTCAGAATGATTATAGT |
| | | TATCCGTACACGTTCGGCCAAGGGACCAAGGTG |
| | | GAAATCAAACGTACGGTGGCTGCACCATCTGTC |
| | | TTCATCTTCCCGCCATCTGATGAGCAGTTGAAA |
| | | TCTGGAACTGCCTCTGTTGTGTGCCTGCTGAAT |
| | | AACTTCTATCCCAGAGAGGCCAAAGTACAGTGG |
| | | AAGGTGGATAACGCCCTCCAATCGGGTAACTCC |
| | | CAGGAGAGTGTCACAGAGCAGGACAGCAAGGAC |
| | | AGCACCTACAGCCTCAGCAGCACCCTGACGCTG |
| | | AGCAAAGCAGACTACGAGAAACACAAAGTCTAC |
| | | GCCTGCGAAGTCACCCATCAGGGCCTGAGCTCG |
| | | CCCGTCACAAAGAGCTTCAACAGGGGAGAGTGT |

BAP049-hum02 HC

| | | |
|---|---|---|
| SEQ ID NO: 137 (Kabat) | HCDR1 | TYWMH |
| SEQ ID NO: 138 (Kabat) | HCDR2 | NIYPGTGGSNFDEKFKN |
| SEQ ID NO: 139 (Kabat) | HCDR3 | WTTGTGAY |
| SEQ ID NO: 140 (Chothia) | HCDR1 | GYTFTTY |
| SEQ ID NO: 141 (Chothia) | HCDR2 | YPGTGG |
| SEQ ID NO: 139 (Chothia) | HCDR3 | WTTGTGAY |
| SEQ ID NO: 172 | VH | EVQLVQSGAEVKKPGESLRISCKGSGYTFTTYW |
| | | MHWVRQATGQGLEWMGNIYPGTGGSNFDEKFKN |
| | | RVTITADKSTSTAYMELSSLRSEDTAVYYCTRW |
| | | TTGTGAYWGQGTTVTVSS |
| SEQ ID NO: 173 | DNA VH | GAAGTGCAGCTGGTGCAGTCTGGAGCAGAGGTG |
| | | AAAAAGCCCGGGGAGTCTCTGAGGATCTCCTGT |
| | | AAGGGTTCTGGCTACACATTCACCACTTACTGG |
| | | ATGCACTGGGTGCGACAGGCCACTGGACAAGGG |
| | | CTTGAGTGGATGGGTAATATTTATCCTGGTACT |
| | | GGTGGTTCTAACTTCGATGAGAAGTTCAAGAAC |
| | | AGAGTCACGATTACCGCGGACAAATCCACGAGC |
| | | ACAGCCTACATGGAGCTGAGCAGCCTGAGATCT |
| | | GAGGACACGGCCGTGTATTACTGTACAAGATGG |
| | | ACTACTGGGACGGGAGCTTATTGGGGCCAGGGC |
| | | ACCACCGTGACCGTGTCCTCC |
| SEQ ID NO: 174 | HC | EVQLVQSGAEVKKPGESLRISCKGSGYTFTTYW |
| | | MHWVRQATGQGLEWMGNIYPGTGGSNFDEKFKN |
| | | RVTITADKSTSTAYMELSSLRSEDTAVYYCTRW |
| | | TTGTGAYWGQGTTVTVSSASTKGPSVFPLAPCS |
| | | RSTSESTAALGCLVKDYFPEPVTVSWNSGALTS |
| | | GVHTFPAVLQSSGLYSLSSVVTVPSSSLGTKTY |
| | | TCNVDHKPSNTKVDKRVESKYGPPCPPCPAPEF |
| | | LGGPSVFLFPPKPKDTLMISRTPEVTCVVVDVS |
| | | QEDPEVQFNWYVDGVEVHNAKTKPREEQFNSTY |
| | | RVVSVLTVLHQDWLNGKEYKCKVSNKGLPSSIE |
| | | KTISKAKGQPREPQVYTLPPSQEEMTKNQVSLT |
| | | CLVKGFYPSDIAVEWESNGQPENNYKTTPPVLD |
| | | SDGSFFLYSRLTVDKSRWQEGNVFSCSVMHEAL |
| | | HNHYTQKSLSLSLGK |
| SEQ ID NO: 175 | DNA HC | GAAGTGCAGCTGGTGCAGTCTGGAGCAGAGGTG |
| | | AAAAAGCCCGGGGAGTCTCTGAGGATCTCCTGT |
| | | AAGGGTTCTGGCTACACATTCACCACTTACTGG |
| | | ATGCACTGGGTGCGACAGGCCACTGGACAAGGG |
| | | CTTGAGTGGATGGGTAATATTTATCCTGGTACT |
| | | GGTGGTTCTAACTTCGATGAGAAGTTCAAGAAC |
| | | AGAGTCACGATTACCGCGGACAAATCCACGAGC |
| | | ACAGCCTACATGGAGCTGAGCAGCCTGAGATCT |
| | | GAGGACACGGCCGTGTATTACTGTACAAGATGG |
| | | ACTACTGGGACGGGAGCTTATTGGGGCCAGGGC |
| | | ACCACCGTGACCGTGTCCTCCGCTTCCACCAAG |
| | | GGCCCATCCGTCTTCCCCCTGGCGCCCTGCTCC |
| | | AGGAGCACCTCCGAGAGCACAGCCGCCCTGGGC |
| | | TGCCTGGTCAAGGACTACTTCCCCGAACCGGTG |
| | | ACGGTGTCGTGGAACTCAGGCGCCCTGACCAGC |
| | | GGCGTGCACACCTTCCCGGCTGTCCTACAGTCC |
| | | TCAGGACTCTACTCCCTCAGCAGCGTGGTGACC |
| | | GTGCCCTCCAGCAGCTTGGGCACGAAGACCTAC |
| | | ACCTGCAACGTAGATCACAAGCCCAGCAACACC |
| | | AAGGTGGACAAGAGAGTTGAGTCCAAATATGGT |
| | | CCCCCATGCCCACCGTGCCCAGCACCTGAGTTC |
| | | CTGGGGGGACCATCAGTCTTCCTGTTCCCCCCA |
| | | AAACCCAAGGACACTCTCATGATCTCCCGGACC |
| | | CCTGAGGTCACGTGCGTGGTGGTGGACGTGAGC |
| | | CAGGAAGACCCCGAGGTCCAGTTCAACTGGTAC |
| | | GTGGATGGCGTGGAGGTGCATAATGCCAAGACA |
| | | AAGCCGCGGGAGGAGCAGTTCAACAGCACGTAC |
| | | CGTGTGGTCAGCGTCCTCACCGTCCTGCACCAG |
| | | GACTGGCTGAACGGCAAGGAGTACAAGTGCAAG |
| | | GTGTCCAACAAAGGCCTCCCGTCCTCCATCGAG |
| | | AAAACCATCTCCAAAGCCAAAGGGCAGCCCCGA |
| | | GAGCCACAGGTGTACACCCTGCCCCCATCCCAG |
| | | GAGGAGATGACCAAGAACCAGGTCAGCCTGACC |
| | | TGCCTGGTCAAAGGCTTCTACCCCAGCGACATC |
| | | GCCGTGGAGTGGGAGAGCAATGGGCAGCCGGAG |
| | | AACAACTACAAGACCACGCCTCCCGTGCTGGAC |
| | | TCCGACGGCTCCTTCTTCCTCTACAGCAGGCTA |
| | | ACCGTGGACAAGAGCAGGTGGCAGGAGGGGAAT |
| | | GTCTTCTCATGCTCCGTGATGCATGAGGCTCTG |
| | | CACAACCACTACACACAGAAGAGCCTCTCCCTG |
| | | TCTCTGGGTAAA |

BAP049-hum02 LC

| | | |
|---|---|---|
| SEQ ID NO: 146 (Kabat) | LCDR1 | KSSQSLLDSGNQKNFLT |
| SEQ ID NO: 147 (Kabat) | LCDR2 | WASTRES |
| SEQ ID NO: 166 (Kabat) | LCDR3 | QNDYSYPYT |
| SEQ ID NO: 149 (Chothia) | LCDR1 | SQSLLDSGNQKNF |
| SEQ ID NO: 150 (Chothia) | LCDR2 | WAS |
| SEQ ID NO: 167 (Chothia) | LCDR3 | DYSYPY |
| SEQ ID NO: 180 | VL | DIQMTQSPSSLSASVGDRVTITCKSSQSLLDSG |
| | | NQKNFLTWYQQKPGQAPRLLIYWASTRESGIPP |
| | | RFSGSGYGTDFTLTINNIESEDAAYYFCQNDYS |
| | | YPYTFGQGTKVEIK |
| SEQ ID NO: 181 | DNA VL | GACATCCAGATGACCCAGTCTCCATCCTCCCTG |
| | | TCTGCATCTGTAGGAGACAGAGTCACCATCACT |
| | | TGCAAGTCCAGTCAGAGTCTGTTAGACAGTGGA |
| | | AATCAAAAGAACTTCTTGACCTGGTACCAGCAG |
| | | AAACCTGGCCAGGCTCCCAGGCTCCTCATCTAT |
| | | TGGGCATCCACTAGGGAATCTGGGATCCCACCT |
| | | CGATTCAGTGGCAGCGGGTATGGAACAGATTTT |
| | | ACCCTCACAATTAATAACATAGAATCTGAGGAT |
| | | GCTGCATATTACTTCTGTCAGAATGATTATAGT |
| | | TATCCGTACACGTTCGGCCAAGGGACCAAGGTG |
| | | GAAATCAAA |
| SEQ ID NO: 182 | LC | DIQMTQSPSSLSASVGDRVTITCKSSQSLLDSG |
| | | NQKNFLTWYQQKPGQAPRLLIYWASTRESGIPP |
| | | RFSGSGYGTDFTLTINNIESEDAAYYFCQNDYS |
| | | YPYTFGQGTKVEIKRTVAAPSVFIFPPSDEQLK |
| | | SGTASVVCLLNNFYPREAKVQWKVDNALQSGNS |
| | | QESVTEQDSKDSTYSLSSTLTLSKADYEKHKVY |
| | | ACEVTHQGLSSPVTKSFNRGEC |
| SEQ ID NO: 183 | DNA LC | GACATCCAGATGACCCAGTCTCCATCCTCCCTG |
| | | TCTGCATCTGTAGGAGACAGAGTCACCATCACT |
| | | TGCAAGTCCAGTCAGAGTCTGTTAGACAGTGGA |
| | | AATCAAAAGAACTTCTTGACCTGGTACCAGCAG |
| | | AAACCTGGCCAGGCTCCCAGGCTCCTCATCTAT |
| | | TGGGCATCCACTAGGGAATCTGGGATCCCACCT |
| | | CGATTCAGTGGCAGCGGGTATGGAACAGATTTT |
| | | ACCCTCACAATTAATAACATAGAATCTGAGGAT |
| | | GCTGCATATTACTTCTGTCAGAATGATTATAGT |
| | | TATCCGTACACGTTCGGCCAAGGGACCAAGGTG |
| | | GAAATCAAACGTACGGTGGCTGCACCATCTGTC |
| | | TTCATCTTCCCGCCATCTGATGAGCAGTTGAAA |
| | | TCTGGAACTGCCTCTGTTGTGTGCCTGCTGAAT |
| | | AACTTCTATCCCAGAGAGGCCAAAGTACAGTGG |
| | | AAGGTGGATAACGCCCTCCAATCGGGTAACTCC |
| | | CAGGAGAGTGTCACAGAGCAGGACAGCAAGGAC |
| | | AGCACCTACAGCCTCAGCAGCACCCTGACGCTG |
| | | AGCAAAGCAGACTACGAGAAACACAAAGTCTAC |
| | | GCCTGCGAAGTCACCCATCAGGGCCTGAGCTCG |
| | | CCCGTCACAAAGAGCTTCAACAGGGGAGAGTGT |

BAP049-hum03 HC

| | | |
|---|---|---|
| SEQ ID NO: 137 (Kabat) | HCDR1 | TYWMH |
| SEQ ID NO: 138 (Kabat) | HCDR2 | NIYPGTGGSNFDEKFKN |
| SEQ ID NO: 139 (Kabat) | HCDR3 | WTTGTGAY |
| SEQ ID NO: 140 (Chothia) | HCDR1 | GYTFTTY |
| SEQ ID NO: 141 (Chothia) | HCDR2 | YPGTGG |
| SEQ ID NO: 139 (Chothia) | HCDR3 | WTTGTGAY |
| SEQ ID NO: 184 | VH | EVQLVQSGAEVKKPGESLRISCKGSGYTFTTYW |
| | | MHWIRQSPSRGLEWLGNIYPGTGGSNFDEKFKN |
| | | RFTISRDNSKNTLYLQMNSLRAEDTAVYYCTRW |
| | | TTGTGAYWGQGTTVTVSS |
| SEQ ID NO: 185 | DNA VH | GAAGTGCAGCTGGTGCAGTCTGGAGCAGAGGTG |
| | | AAAAAGCCCGGGGAGTCTCTGAGGATCTCCTGT |
| | | AAGGGTTCTGGCTACACATTCACCACTTACTGG |
| | | ATGCACTGGATCAGGCAGTCCCCATCGAGAGGC |
| | | CTTGAGTGGCTGGGTAATATTTATCCTGGTACT |
| | | GGTGGTTCTAACTTCGATGAGAAGTTCAAGAAC |
| | | AGATTCACCATCTCCAGAGACAATTCCAAGAAC |
| | | ACGCTGTATCTTCAAATGAACAGCCTGAGAGCC |
| | | GAGGACACGGCCGTGTATTACTGTACAAGATGG |
| | | ACTACTGGGACGGGAGCTTATTGGGGCCAGGGC |
| | | ACCACCGTGACCGTGTCCTCC |
| SEQ ID NO: 186 | HC | EVQLVQSGAEVKKPGESLRISCKGSGYTFTTYW |
| | | MHWIRQSPSRGLEWLGNIYPGTGGSNFDEKFKN |
| | | RFTISRDNSKNTLYLQMNSLRAEDTAVYYCTRW |
| | | TTGTGAYWGQGTTVTVSSASTKGPSVFPLAPCS |
| | | RSTSESTAALGCLVKDYFPEPVTVSWNSGALTS |
| | | GVHTFPAVLQSSGLYSLSSVVTVPSSSLGTKTY |
| | | TCNVDHKPSNTKVDKRVESKYGPPCPPCPAPEF |
| | | LGGPSVFLFPPKPKDTLMISRTPEVTCVVVDVS |
| | | QEDPEVQFNWYVDGVEVHNAKTKPREEQFNSTY |
| | | RVVSVLTVLHQDWLNGKEYKCKVSNKGLPSSIE |
| | | KTISKAKGQPREPQVYTLPPSQEEMTKNQVSLT |
| | | CLVKGFYPSDIAVEWESNGQPENNYKTTPPVLD |
| | | SDGSFFLYSRLTVDKSRWQEGNVFSCSVMHEAL |
| | | HNHYTQKSLSLSLGK |
| SEQ ID NO: 187 | DNA HC | GAAGTGCAGCTGGTGCAGTCTGGAGCAGAGGTG |
| | | AAAAAGCCCGGGGAGTCTCTGAGGATCTCCTGT |
| | | AAGGGTTCTGGCTACACATTCACCACTTACTGG |
| | | ATGCACTGGATCAGGCAGTCCCCATCGAGAGGC |
| | | CTTGAGTGGCTGGGTAATATTTATCCTGGTACT |
| | | GGTGGTTCTAACTTCGATGAGAAGTTCAAGAAC |
| | | AGATTCACCATCTCCAGAGACAATTCCAAGAAC |
| | | ACGCTGTATCTTCAAATGAACAGCCTGAGAGCC |
| | | GAGGACACGGCCGTGTATTACTGTACAAGATGG |
| | | ACTACTGGGACGGGAGCTTATTGGGGCCAGGGC |
| | | ACCACCGTGACCGTGTCCTCCGCTTCCACCAAG |
| | | GGCCCATCCGTCTTCCCCCTGGCGCCCTGCTCC |
| | | AGGAGCACCTCCGAGAGCACAGCCGCCCTGGGC |
| | | TGCCTGGTCAAGGACTACTTCCCCGAACCGGTG |
| | | ACGGTGTCGTGGAACTCAGGCGCCCTGACCAGC |
| | | GGCGTGCACACCTTCCCGGCTGTCCTACAGTCC |
| | | TCAGGACTCTACTCCCTCAGCAGCGTGGTGACC |
| | | GTGCCCTCCAGCAGCTTGGGCACGAAGACCTAC |
| | | ACCTGCAACGTAGATCACAAGCCCAGCAACACC |
| | | AAGGTGGACAAGAGAGTTGAGTCCAAATATGGT |
| | | CCCCCATGCCCACCGTGCCCAGCACCTGAGTTC |
| | | CTGGGGGGACCATCAGTCTTCCTGTTCCCCCCA |
| | | AAACCCAAGGACACTCTCATGATCTCCCGGACC |
| | | CCTGAGGTCACGTGCGTGGTGGTGGACGTGAGC |
| | | CAGGAAGACCCCGAGGTCCAGTTCAACTGGTAC |
| | | GTGGATGGCGTGGAGGTGCATAATGCCAAGACA |
| | | AAGCCGCGGGAGGAGCAGTTCAACAGCACGTAC |
| | | CGTGTGGTCAGCGTCCTCACCGTCCTGCACCAG |
| | | GACTGGCTGAACGGCAAGGAGTACAAGTGCAAG |
| | | GTGTCCAACAAAGGCCTCCCGTCCTCCATCGAG |
| | | AAAACCATCTCCAAAGCCAAAGGGCAGCCCCGA |
| | | GAGCCACAGGTGTACACCCTGCCCCCATCCCAG |
| | | GAGGAGATGACCAAGAACCAGGTCAGCCTGACC |
| | | TGCCTGGTCAAAGGCTTCTACCCCAGCGACATC |
| | | GCCGTGGAGTGGGAGAGCAATGGGCAGCCGGAG |
| | | AACAACTACAAGACCACGCCTCCCGTGCTGGAC |
| | | TCCGACGGCTCCTTCTTCCTCTACAGCAGGCTA |
| | | ACCGTGGACAAGAGCAGGTGGCAGGAGGGGAAT |
| | | GTCTTCTCATGCTCCGTGATGCATGAGGCTCTG |
| | | CACAACCACTACACACAGAAGAGCCTCTCCCTG |
| | | TCTCTGGGTAAA |

BAP049-hum03 LC

| | | |
|---|---|---|
| SEQ ID NO: 146 (Kabat) | LCDR1 | KSSQSLLDSGNQKNFLT |
| SEQ ID NO: 147 (Kabat) | LCDR2 | WASTRES |
| SEQ ID NO: 166 (Kabat) | LCDR3 | QNDYSYPYT |
| SEQ ID NO: 149 (Chothia) | LCDR1 | SQSLLDSGNQKNF |
| SEQ ID NO: 150 (Chothia) | LCDR2 | WAS |
| SEQ ID NO: 167 (Chothia) | LCDR3 | DYSYPY |
| SEQ ID NO: 180 | VL | DIQMTQSPSSLSASVGDRVTITCKSSQSLLDSG |
| | | NQKNFLTWYQQKPGQAPRLLIYWASTRESGIPP |
| | | RFSGSGYGTDFTLTINNIESEDAAYYFCQNDYS |
| | | YPYTFGQGTKVEIK |
| SEQ ID NO: 181 | DNA VL | GACATCCAGATGACCCAGTCTCCATCCTCCCTG |
| | | TCTGCATCTGTAGGAGACAGAGTCACCATCACT |
| | | TGCAAGTCCAGTCAGAGTCTGTTAGACAGTGGA |
| | | AATCAAAAGAACTTCTTGACCTGGTACCAGCAG |
| | | AAACCTGGCCAGGCTCCCAGGCTCCTCATCTAT |
| | | TGGGCATCCACTAGGGAATCTGGGATCCCACCT |
| | | CGATTCAGTGGCAGCGGGTATGGAACAGATTTT |
| | | ACCCTCACAATTAATAACATAGAATCTGAGGAT |
| | | GCTGCATATTACTTCTGTCAGAATGATTATAGT |
| | | TATCCGTACACGTTCGGCCAAGGGACCAAGGTG |
| | | GAAATCAAA |
| SEQ ID NO: 182 | LC | DIQMTQSPSSLSASVGDRVTITCKSSQSLLDSG |
| | | NQKNFLTWYQQKPGQAPRLLIYWASTRESGIPP |
| | | RFSGSGYGTDFTLTINNIESEDAAYYFCQNDYS |
| | | YPYTFGQGTKVEIKRTVAAPSVFIFPPSDEQLK |
| | | SGTASVVCLLNNFYPREAKVQWKVDNALQSGNS |
| | | QESVTEQDSKDSTYSLSSTLTLSKADYEKHKVY |
| | | ACEVTHQGLSSPVTKSFNRGEC |
| SEQ ID NO: 183 | DNA LC | GACATCCAGATGACCCAGTCTCCATCCTCCCTG |
| | | TCTGCATCTGTAGGAGACAGAGTCACCATCACT |
| | | TGCAAGTCCAGTCAGAGTCTGTTAGACAGTGGA |
| | | AATCAAAAGAACTTCTTGACCTGGTACCAGCAG |
| | | AAACCTGGCCAGGCTCCCAGGCTCCTCATCTAT |
| | | TGGGCATCCACTAGGGAATCTGGGATCCCACCT |
| | | CGATTCAGTGGCAGCGGGTATGGAACAGATTTT |
| | | ACCCTCACAATTAATAACATAGAATCTGAGGAT |
| | | GCTGCATATTACTTCTGTCAGAATGATTATAGT |
| | | TATCCGTACACGTTCGGCCAAGGGACCAAGGTG |
| | | GAAATCAAACGTACGGTGGCTGCACCATCTGTC |
| | | TTCATCTTCCCGCCATCTGATGAGCAGTTGAAA |
| | | TCTGGAACTGCCTCTGTTGTGTGCCTGCTGAAT |
| | | AACTTCTATCCCAGAGAGGCCAAAGTACAGTGG |
| | | AAGGTGGATAACGCCCTCCAATCGGGTAACTCC |
| | | CAGGAGAGTGTCACAGAGCAGGACAGCAAGGAC |
| | | AGCACCTACAGCCTCAGCAGCACCCTGACGCTG |
| | | AGCAAAGCAGACTACGAGAAACACAAAGTCTAC |
| | | GCCTGCGAAGTCACCCATCAGGGCCTGAGCTCG |
| | | CCCGTCACAAAGAGCTTCAACAGGGGAGAGTGT |

BAP049-hum04 HC

| | | |
|---|---|---|
| SEQ ID NO: 137 (Kabat) | HCDR1 | TYWMH |
| SEQ ID NO: 138 (Kabat) | HCDR2 | NIYPGTGGSNFDEKFKN |
| SEQ ID NO: 139 (Kabat) | HCDR3 | WTTGTGAY |
| SEQ ID NO: 140 (Chothia) | HCDR1 | GYTFTTY |
| SEQ ID NO: 141 (Chothia) | HCDR2 | YPGTGG |
| SEQ ID NO: 139 (Chothia) | HCDR3 | WTTGTGAY |
| SEQ ID NO: 184 | VH | EVQLVQSGAEVKKPGESLRISCKGSGYTFTTYW |
| | | MHWIRQSPSRGLEWLGNIYPGTGGSNFDEKFKN |
| | | RFTISRDNSKNTLYLQMNSLRAEDTAVYYCTRW |
| | | TTGTGAYWGQGTTVTVSS |
| SEQ ID NO: 185 | DNA VH | GAAGTGCAGCTGGTGCAGTCTGGAGCAGAGGTG |
| | | AAAAAGCCCGGGGAGTCTCTGAGGATCTCCTGT |
| | | AAGGGTTCTGGCTACACATTCACCACTTACTGG |
| | | ATGCACTGGATCAGGCAGTCCCCATCGAGAGGC |
| | | CTTGAGTGGCTGGGTAATATTTATCCTGGTACT |
| | | GGTGGTTCTAACTTCGATGAGAAGTTCAAGAAC |
| | | AGATTCACCATCTCCAGAGACAATTCCAAGAAC |
| | | ACGCTGTATCTTCAAATGAACAGCCTGAGAGCC |
| | | GAGGACACGGCCGTGTATTACTGTACAAGATGG |
| | | ACTACTGGGACGGGAGCTTATTGGGGCCAGGGC |
| | | ACCACCGTGACCGTGTCCTCC |
| SEQ ID NO: 186 | HC | EVQLVQSGAEVKKPGESLRISCKGSGYTFTTYW |
| | | MHWIRQSPSRGLEWLGNIYPGTGGSNFDEKFKN |
| | | RFTISRDNSKNTLYLQMNSLRAEDTAVYYCTRW |
| | | TTGTGAYWGQGTTVTVSSASTKGPSVFPLAPCS |
| | | RSTSESTAALGCLVKDYFPEPVTVSWNSGALTS |
| | | GVHTFPAVLQSSGLYSLSSVVTVPSSSLGTKTY |
| | | TCNVDHKPSNTKVDKRVESKYGPPCPPCPAPEF |
| | | LGGPSVFLFPPKPKDTLMISRTPEVTCVVVDVS |
| | | QEDPEVQFNWYVDGVEVHNAKTKPREEQFNSTY |
| | | RVVSVLTVLHQDWLNGKEYKCKVSNKGLPSSIE |
| | | KTISKAKGQPREPQVYTLPPSQEEMTKNQVSLT |
| | | CLVKGFYPSDIAVEWESNGQPENNYKTTPPVLD |
| | | SDGSFFLYSRLTVDKSRWQEGNVFSCSVMHEAL |
| | | HNHYTQKSLSLSLGK |
| SEQ ID NO: 187 | DNA HC | GAAGTGCAGCTGGTGCAGTCTGGAGCAGAGGTG |
| | | AAAAAGCCCGGGGAGTCTCTGAGGATCTCCTGT |
| | | AAGGGTTCTGGCTACACATTCACCACTTACTGG |
| | | ATGCACTGGATCAGGCAGTCCCCATCGAGAGGC |
| | | CTTGAGTGGCTGGGTAATATTTATCCTGGTACT |
| | | GGTGGTTCTAACTTCGATGAGAAGTTCAAGAAC |
| | | AGATTCACCATCTCCAGAGACAATTCCAAGAAC |
| | | ACGCTGTATCTTCAAATGAACAGCCTGAGAGCC |
| | | GAGGACACGGCCGTGTATTACTGTACAAGATGG |
| | | ACTACTGGGACGGGAGCTTATTGGGGCCAGGGC |
| | | ACCACCGTGACCGTGTCCTCCGCTTCCACCAAG |
| | | GGCCCATCCGTCTTCCCCCTGGCGCCCTGCTCC |
| | | AGGAGCACCTCCGAGAGCACAGCCGCCCTGGGC |
| | | TGCCTGGTCAAGGACTACTTCCCCGAACCGGTG |
| | | ACGGTGTCGTGGAACTCAGGCGCCCTGACCAGC |
| | | GGCGTGCACACCTTCCCGGCTGTCCTACAGTCC |
| | | TCAGGACTCTACTCCCTCAGCAGCGTGGTGACC |
| | | GTGCCCTCCAGCAGCTTGGGCACGAAGACCTAC |
| | | ACCTGCAACGTAGATCACAAGCCCAGCAACACC |
| | | AAGGTGGACAAGAGAGTTGAGTCCAAATATGGT |
| | | CCCCCATGCCCACCGTGCCCAGCACCTGAGTTC |
| | | CTGGGGGGACCATCAGTCTTCCTGTTCCCCCCA |
| | | AAACCCAAGGACACTCTCATGATCTCCCGGACC |
| | | CCTGAGGTCACGTGCGTGGTGGTGGACGTGAGC |
| | | CAGGAAGACCCCGAGGTCCAGTTCAACTGGTAC |
| | | GTGGATGGCGTGGAGGTGCATAATGCCAAGACA |
| | | AAGCCGCGGGAGGAGCAGTTCAACAGCACGTAC |
| | | CGTGTGGTCAGCGTCCTCACCGTCCTGCACCAG |
| | | GACTGGCTGAACGGCAAGGAGTACAAGTGCAAG |
| | | GTGTCCAACAAAGGCCTCCCGTCCTCCATCGAG |
| | | AAAACCATCTCCAAAGCCAAAGGGCAGCCCCGA |
| | | GAGCCACAGGTGTACACCCTGCCCCCATCCCAG |
| | | GAGGAGATGACCAAGAACCAGGTCAGCCTGACC |
| | | TGCCTGGTCAAAGGCTTCTACCCCAGCGACATC |
| | | GCCGTGGAGTGGGAGAGCAATGGGCAGCCGGAG |
| | | AACAACTACAAGACCACGCCTCCCGTGCTGGAC |
| | | TCCGACGGCTCCTTCTTCCTCTACAGCAGGCTA |
| | | ACCGTGGACAAGAGCAGGTGGCAGGAGGGGAAT |
| | | GTCTTCTCATGCTCCGTGATGCATGAGGCTCTG |
| | | CACAACCACTACACACAGAAGAGCCTCTCCCTG |
| | | TCTCTGGGTAAA |

BAP049-hum04 LC

| | | |
|---|---|---|
| SEQ ID NO: 146 (Kabat) | LCDR1 | KSSQSLLDSGNQKNFLT |
| SEQ ID NO: 147 (Kabat) | LCDR2 | WASTRES |
| SEQ ID NO: 166 (Kabat) | LCDR3 | QNDYSYPYT |
| SEQ ID NO: 149 (Chothia) | LCDR1 | SQSLLDSGNQKNF |
| SEQ ID NO: 150 (Chothia) | LCDR2 | WAS |
| SEQ ID NO: 167 (Chothia) | LCDR3 | DYSYPY |
| SEQ ID NO: 188 | VL | EIVLTQSPATLSLSPGERATLSCKSSQSLLDSG |
| | | NQKNFLTWYQQKPGKAPKLLIYWASTRESGVPS |
| | | RFSGSGSGTDFTFTISSLQPEDIATYYCQNDYS |
| | | YPYTFGQGTKVEIK |
| SEQ ID NO: 189 | DNA VL | GAAATTGTGTTGACACAGTCTCCAGCCACCCTG |
| | | TCTTTGTCTCCAGGGGAAAGAGCCACCCTCTCC |
| | | TGCAAGTCCAGTCAGAGTCTGTTAGACAGTGGA |
| | | AATCAAAAGAACTTCTTGACCTGGTATCAGCAG |
| | | AAACCAGGGAAAGCTCCTAAGCTCCTGATCTAT |
| | | TGGGCATCCACTAGGGAATCTGGGGTCCCATCA |
| | | AGGTTCAGTGGAAGTGGATCTGGGACAGATTTT |
| | | ACTTTCACCATCAGCAGCCTGCAGCCTGAAGAT |
| | | ATTGCAACATATTACTGTCAGAATGATTATAGT |
| | | TATCCGTACACGTTCGGCCAAGGGACCAAGGTG |
| | | GAAATCAAA |
| SEQ ID NO: 190 | LC | EIVLTQSPATLSLSPGERATLSCKSSQSLLDSG |
| | | NQKNFLTWYQQKPGKAPKLLIYWASTRESGVPS |
| | | RFSGSGSGTDFTFTISSLQPEDIATYYCQNDYS |
| | | YPYTFGQGTKVEIKRTVAAPSVFIFPPSDEQLK |
| | | SGTASVVCLLNNFYPREAKVQWKVDNALQSGNS |
| | | QESVTEQDSKDSTYSLSSTLTLSKADYEKHKVY |
| | | ACEVTHQGLSSPVTKSFNRGEC |
| SEQ ID NO: 191 | DNA LC | GAAATTGTGTTGACACAGTCTCCAGCCACCCTG |
| | | TCTTTGTCTCCAGGGGAAAGAGCCACCCTCTCC |
| | | TGCAAGTCCAGTCAGAGTCTGTTAGACAGTGGA |
| | | AATCAAAAGAACTTCTTGACCTGGTATCAGCAG |
| | | AAACCAGGGAAAGCTCCTAAGCTCCTGATCTAT |
| | | TGGGCATCCACTAGGGAATCTGGGGTCCCATCA |
| | | AGGTTCAGTGGAAGTGGATCTGGGACAGATTTT |
| | | ACTTTCACCATCAGCAGCCTGCAGCCTGAAGAT |
| | | ATTGCAACATATTACTGTCAGAATGATTATAGT |
| | | TATCCGTACACGTTCGGCCAAGGGACCAAGGTG |
| | | GAAATCAAACGTACGGTGGCTGCACCATCTGTC |
| | | TTCATCTTCCCGCCATCTGATGAGCAGTTGAAA |
| | | TCTGGAACTGCCTCTGTTGTGTGCCTGCTGAAT |
| | | AACTTCTATCCCAGAGAGGCCAAAGTACAGTGG |
| | | AAGGTGGATAACGCCCTCCAATCGGGTAACTCC |
| | | CAGGAGAGTGTCACAGAGCAGGACAGCAAGGAC |
| | | AGCACCTACAGCCTCAGCAGCACCCTGACGCTG |
| | | AGCAAAGCAGACTACGAGAAACACAAAGTCTAC |
| | | GCCTGCGAAGTCACCCATCAGGGCCTGAGCTCG |
| | | CCCGTCACAAAGAGCTTCAACAGGGGAGAGTGT |

BAP049-hum05 HC

| | | |
|---|---|---|
| SEQ ID NO: 137 (Kabat) | HCDR1 | TYWMH |
| SEQ ID NO: 138 (Kabat) | HCDR2 | NIYPGTGGSNFDEKFKN |
| SEQ ID NO: 139 (Kabat) | HCDR3 | WTTGTGAY |
| SEQ ID NO: 140 (Chothia) | HCDR1 | GYTFTTY |
| SEQ ID NO: 141 (Chothia) | HCDR2 | YPGTGG |
| SEQ ID NO: 139 (Chothia) | HCDR3 | WTTGTGAY |
| SEQ ID NO: 172 | VH | EVQLVQSGAEVKKPGESLRISCKGSGYTFTTYW |
| | | MHWVRQATGQGLEWMGNIYPGTGGSNFDEKFKN |
| | | RVTITADKSTSTAYMELSSLRSEDTAVYYCTRW |
| | | TTGTGAYWGQGTTVTVSS |
| SEQ ID NO: 173 | DNA VH | GAAGTGCAGCTGGTGCAGTCTGGAGCAGAGGTG |
| | | AAAAAGCCCGGGGAGTCTCTGAGGATCTCCTGT |
| | | AAGGGTTCTGGCTACACATTCACCACTTACTGG |
| | | ATGCACTGGGTGCGACAGGCCACTGGACAAGGG |
| | | CTTGAGTGGATGGGTAATATTTATCCTGGTACT |
| | | GGTGGTTCTAACTTCGATGAGAAGTTCAAGAAC |
| | | AGAGTCACGATTACCGCGGACAAATCCACGAGC |
| | | ACAGCCTACATGGAGCTGAGCAGCCTGAGATCT |
| | | GAGGACACGGCCGTGTATTACTGTACAAGATGG |
| | | ACTACTGGGACGGGAGCTTATTGGGGCCAGGGC |
| | | ACCACCGTGACCGTGTCCTCC |
| SEQ ID NO: 174 | HC | EVQLVQSGAEVKKPGESLRISCKGSGYTFTTYW |
| | | MHWVRQATGQGLEWMGNIYPGTGGSNFDEKFKN |
| | | RVTITADKSTSTAYMELSSLRSEDTAVYYCTRW |
| | | TTGTGAYWGQGTTVTVSSASTKGPSVFPLAPCS |
| | | RSTSESTAALGCLVKDYFPEPVTVSWNSGALTS |
| | | GVHTFPAVLQSSGLYSLSSVVTVPSSSLGTKTY |
| | | TCNVDHKPSNTKVDKRVESKYGPPCPPCPAPEF |
| | | LGGPSVFLFPPKPKDTLMISRTPEVTCVVVDVS |
| | | QEDPEVQFNWYVDGVEVHNAKTKPREEQFNSTY |
| | | RVVSVLTVLHQDWLNGKEYKCKVSNKGLPSSIE |
| | | KTISKAKGQPREPQVYTLPPSQEEMTKNQVSLT |
| | | CLVKGFYPSDIAVEWESNGQPENNYKTTPPVLD |
| | | SDGSFFLYSRLTVDKSRWQEGNVFSCSVMHEAL |
| | | HNHYTQKSLSLSLGK |
| SEQ ID NO: 175 | DNA HC | GAAGTGCAGCTGGTGCAGTCTGGAGCAGAGGTG |
| | | AAAAAGCCCGGGGAGTCTCTGAGGATCTCCTGT |
| | | AAGGGTTCTGGCTACACATTCACCACTTACTGG |
| | | ATGCACTGGGTGCGACAGGCCACTGGACAAGGG |
| | | CTTGAGTGGATGGGTAATATTTATCCTGGTACT |
| | | GGTGGTTCTAACTTCGATGAGAAGTTCAAGAAC |
| | | AGAGTCACGATTACCGCGGACAAATCCACGAGC |
| | | ACAGCCTACATGGAGCTGAGCAGCCTGAGATCT |
| | | GAGGACACGGCCGTGTATTACTGTACAAGATGG |
| | | ACTACTGGGACGGGAGCTTATTGGGGCCAGGGC |
| | | ACCACCGTGACCGTGTCCTCCGCTTCCACCAAG |
| | | GGCCCATCCGTCTTCCCCCTGGCGCCCTGCTCC |
| | | AGGAGCACCTCCGAGAGCACAGCCGCCCTGGGC |
| | | TGCCTGGTCAAGGACTACTTCCCCGAACCGGTG |
| | | ACGGTGTCGTGGAACTCAGGCGCCCTGACCAGC |
| | | GGCGTGCACACCTTCCCGGCTGTCCTACAGTCC |
| | | TCAGGACTCTACTCCCTCAGCAGCGTGGTGACC |
| | | GTGCCCTCCAGCAGCTTGGGCACGAAGACCTAC |
| | | ACCTGCAACGTAGATCACAAGCCCAGCAACACC |
| | | AAGGTGGACAAGAGAGTTGAGTCCAAATATGGT |
| | | CCCCCATGCCCACCGTGCCCAGCACCTGAGTTC |
| | | CTGGGGGGACCATCAGTCTTCCTGTTCCCCCCA |
| | | AAACCCAAGGACACTCTCATGATCTCCCGGACC |
| | | CCTGAGGTCACGTGCGTGGTGGTGGACGTGAGC |
| | | CAGGAAGACCCCGAGGTCCAGTTCAACTGGTAC |
| | | GTGGATGGCGTGGAGGTGCATAATGCCAAGACA |
| | | AAGCCGCGGGAGGAGCAGTTCAACAGCACGTAC |
| | | CGTGTGGTCAGCGTCCTCACCGTCCTGCACCAG |
| | | GACTGGCTGAACGGCAAGGAGTACAAGTGCAAG |
| | | GTGTCCAACAAAGGCCTCCCGTCCTCCATCGAG |
| | | AAAACCATCTCCAAAGCCAAAGGGCAGCCCCGA |
| | | GAGCCACAGGTGTACACCCTGCCCCCATCCCAG |
| | | GAGGAGATGACCAAGAACCAGGTCAGCCTGACC |
| | | TGCCTGGTCAAAGGCTTCTACCCCAGCGACATC |
| | | GCCGTGGAGTGGGAGAGCAATGGGCAGCCGGAG |
| | | AACAACTACAAGACCACGCCTCCCGTGCTGGAC |
| | | TCCGACGGCTCCTTCTTCCTCTACAGCAGGCTA |
| | | ACCGTGGACAAGAGCAGGTGGCAGGAGGGGAAT |
| | | GTCTTCTCATGCTCCGTGATGCATGAGGCTCTG |
| | | CACAACCACTACACACAGAAGAGCCTCTCCCTG |
| | | TCTCTGGGTAAA |

BAP049-hum05 LC

| | | |
|---|---|---|
| SEQ ID NO: 146 (Kabat) | LCDR1 | KSSQSLLDSGNQKNFLT |
| SEQ ID NO: 147 (Kabat) | LCDR2 | WASTRES |
| SEQ ID NO: 166 (Kabat) | LCDR3 | QNDYSYPYT |
| SEQ ID NO: 149 (Chothia) | LCDR1 | SQSLLDSGNQKNF |
| SEQ ID NO: 150 (Chothia) | LCDR2 | WAS |
| SEQ ID NO: 167 (Chothia) | LCDR3 | DYSYPY |
| SEQ ID NO: 188 | VL | EIVLTQSPATLSLSPGERATLSCKSSQSLLDSG |
| | | NQKNFLTWYQQKPGKAPKLLIYWASTRESGVPS |
| | | RFSGSGSGTDFTFTISSLQPEDIATYYCQNDYS |
| | | YPYTFGQGTKVEIK |
| SEQ ID NO: 189 | DNA VL | GAAATTGTGTTGACACAGTCTCCAGCCACCCTG |
| | | TCTTTGTCTCCAGGGGAAAGAGCCACCCTCTCC |
| | | TGCAAGTCCAGTCAGAGTCTGTTAGACAGTGGA |
| | | AATCAAAAGAACTTCTTGACCTGGTATCAGCAG |
| | | AAACCAGGGAAAGCTCCTAAGCTCCTGATCTAT |
| | | TGGGCATCCACTAGGGAATCTGGGGTCCCATCA |
| | | AGGTTCAGTGGAAGTGGATCTGGGACAGATTTT |
| | | ACTTTCACCATCAGCAGCCTGCAGCCTGAAGAT |
| | | ATTGCAACATATTACTGTCAGAATGATTATAGT |
| | | TATCCGTACACGTTCGGCCAAGGGACCAAGGTG |
| | | GAAATCAAA |
| SEQ ID NO: 190 | LC | EIVLTQSPATLSLSPGERATLSCKSSQSLLDSG |
| | | NQKNFLTWYQQKPGKAPKLLIYWASTRESGVPS |
| | | RFSGSGSGTDFTFTISSLQPEDIATYYCQNDYS |
| | | YPYTFGQGTKVEIKRTVAAPSVFIFPPSDEQLK |
| | | SGTASVVCLLNNFYPREAKVQWKVDNALQSGNS |
| | | QESVTEQDSKDSTYSLSSTLTLSKADYEKHKVY |
| | | ACEVTHQGLSSPVTKSFNRGEC |
| SEQ ID NO: 191 | DNA LC | GAAATTGTGTTGACACAGTCTCCAGCCACCCTG |
| | | TCTTTGTCTCCAGGGGAAAGAGCCACCCTCTCC |
| | | TGCAAGTCCAGTCAGAGTCTGTTAGACAGTGGA |
| | | AATCAAAAGAACTTCTTGACCTGGTATCAGCAG |
| | | AAACCAGGGAAAGCTCCTAAGCTCCTGATCTAT |
| | | TGGGCATCCACTAGGGAATCTGGGGTCCCATCA |
| | | AGGTTCAGTGGAAGTGGATCTGGGACAGATTTT |
| | | ACTTTCACCATCAGCAGCCTGCAGCCTGAAGAT |
| | | ATTGCAACATATTACTGTCAGAATGATTATAGT |
| | | TATCCGTACACGTTCGGCCAAGGGACCAAGGTG |
| | | GAAATCAAACGTACGGTGGCTGCACCATCTGTC |
| | | TTCATCTTCCCGCCATCTGATGAGCAGTTGAAA |
| | | TCTGGAACTGCCTCTGTTGTGTGCCTGCTGAAT |
| | | AACTTCTATCCCAGAGAGGCCAAAGTACAGTGG |
| | | AAGGTGGATAACGCCCTCCAATCGGGTAACTCC |
| | | CAGGAGAGTGTCACAGAGCAGGACAGCAAGGAC |
| | | AGCACCTACAGCCTCAGCAGCACCCTGACGCTG |
| | | AGCAAAGCAGACTACGAGAAACACAAAGTCTAC |
| | | GCCTGCGAAGTCACCCATCAGGGCCTGAGCTCG |
| | | CCCGTCACAAAGAGCTTCAACAGGGGAGAGTGT |

BAP049-hum06 HC

| | | |
|---|---|---|
| SEQ ID NO: 137 (Kabat) | HCDR1 | TYWMH |
| SEQ ID NO: 138 (Kabat) | HCDR2 | NIYPGTGGSNFDEKFKN |
| SEQ ID NO: 139 (Kabat) | HCDR3 | WTTGTGAY |
| SEQ ID NO: 140 (Chothia) | HCDR1 | GYTFTTY |
| SEQ ID NO: 141 (Chothia) | HCDR2 | YPGTGG |
| SEQ ID NO: 139 (Chothia) | HCDR3 | WTTGTGAY |
| SEQ ID NO: 172 | VH | EVQLVQSGAEVKKPGESLRISCKGSGYTFTTYW |
| | | MHWVRQATGQGLEWMGNIYPGTGGSNFDEKFKN |
| | | RVTITADKSTSTAYMELSSLRSEDTAVYYCTRW |
| | | TTGTGAYWGQGTTVTVSS |
| SEQ ID NO: 173 | DNA VH | GAAGTGCAGCTGGTGCAGTCTGGAGCAGAGGTG |
| | | AAAAAGCCCGGGGAGTCTCTGAGGATCTCCTGT |
| | | AAGGGTTCTGGCTACACATTCACCACTTACTGG |
| | | ATGCACTGGGTGCGACAGGCCACTGGACAAGGG |
| | | CTTGAGTGGATGGGTAATATTTATCCTGGTACT |
| | | GGTGGTTCTAACTTCGATGAGAAGTTCAAGAAC |
| | | AGAGTCACGATTACCGCGGACAAATCCACGAGC |
| | | ACAGCCTACATGGAGCTGAGCAGCCTGAGATCT |
| | | GAGGACACGGCCGTGTATTACTGTACAAGATGG |
| | | ACTACTGGGACGGGAGCTTATTGGGGCCAGGGC |
| | | ACCACCGTGACCGTGTCCTCC |
| SEQ ID NO: 174 | HC | EVQLVQSGAEVKKPGESLRISCKGSGYTFTTYW |
| | | MHWVRQATGQGLEWMGNIYPGTGGSNFDEKFKN |
| | | RVTITADKSTSTAYMELSSLRSEDTAVYYCTRW |
| | | TTGTGAYWGQGTTVTVSSASTKGPSVFPLAPCS |
| | | RSTSESTAALGCLVKDYFPEPVTVSWNSGALTS |
| | | GVHTFPAVLQSSGLYSLSSVVTVPSSSLGTKTY |
| | | TCNVDHKPSNTKVDKRVESKYGPPCPPCPAPEF |
| | | LGGPSVFLFPPKPKDTLMISRTPEVTCVVVDVS |
| | | QEDPEVQFNWYVDGVEVHNAKTKPREEQFNSTY |
| | | RVVSVLTVLHQDWLNGKEYKCKVSNKGLPSSIE |
| | | KTISKAKGQPREPQVYTLPPSQEEMTKNQVSLT |
| | | CLVKGFYPSDIAVEWESNGQPENNYKTTPPVLD |
| | | SDGSFFLYSRLTVDKSRWQEGNVFSCSVMHEAL |
| | | HNHYTQKSLSLSLGK |
| SEQ ID NO: 175 | DNA HC | GAAGTGCAGCTGGTGCAGTCTGGAGCAGAGGTG |
| | | AAAAAGCCCGGGGAGTCTCTGAGGATCTCCTGT |
| | | AAGGGTTCTGGCTACACATTCACCACTTACTGG |
| | | ATGCACTGGGTGCGACAGGCCACTGGACAAGGG |
| | | CTTGAGTGGATGGGTAATATTTATCCTGGTACT |
| | | GGTGGTTCTAACTTCGATGAGAAGTTCAAGAAC |
| | | AGAGTCACGATTACCGCGGACAAATCCACGAGC |
| | | ACAGCCTACATGGAGCTGAGCAGCCTGAGATCT |
| | | GAGGACACGGCCGTGTATTACTGTACAAGATGG |
| | | ACTACTGGGACGGGAGCTTATTGGGGCCAGGGC |
| | | ACCACCGTGACCGTGTCCTCCGCTTCCACCAAG |
| | | GGCCCATCCGTCTTCCCCCTGGCGCCCTGCTCC |
| | | AGGAGCACCTCCGAGAGCACAGCCGCCCTGGGC |
| | | TGCCTGGTCAAGGACTACTTCCCCGAACCGGTG |
| | | ACGGTGTCGTGGAACTCAGGCGCCCTGACCAGC |
| | | GGCGTGCACACCTTCCCGGCTGTCCTACAGTCC |
| | | TCAGGACTCTACTCCCTCAGCAGCGTGGTGACC |
| | | GTGCCCTCCAGCAGCTTGGGCACGAAGACCTAC |
| | | ACCTGCAACGTAGATCACAAGCCCAGCAACACC |
| | | AAGGTGGACAAGAGAGTTGAGTCCAAATATGGT |
| | | CCCCCATGCCCACCGTGCCCAGCACCTGAGTTC |
| | | CTGGGGGGACCATCAGTCTTCCTGTTCCCCCCA |
| | | AAACCCAAGGACACTCTCATGATCTCCCGGACC |
| | | CCTGAGGTCACGTGCGTGGTGGTGGACGTGAGC |
| | | CAGGAAGACCCCGAGGTCCAGTTCAACTGGTAC |
| | | GTGGATGGCGTGGAGGTGCATAATGCCAAGACA |
| | | AAGCCGCGGGAGGAGCAGTTCAACAGCACGTAC |
| | | CGTGTGGTCAGCGTCCTCACCGTCCTGCACCAG |
| | | GACTGGCTGAACGGCAAGGAGTACAAGTGCAAG |
| | | GTGTCCAACAAAGGCCTCCCGTCCTCCATCGAG |
| | | AAAACCATCTCCAAAGCCAAAGGGCAGCCCCGA |
| | | GAGCCACAGGTGTACACCCTGCCCCCATCCCAG |
| | | GAGGAGATGACCAAGAACCAGGTCAGCCTGACC |
| | | TGCCTGGTCAAAGGCTTCTACCCCAGCGACATC |
| | | GCCGTGGAGTGGGAGAGCAATGGGCAGCCGGAG |
| | | AACAACTACAAGACCACGCCTCCCGTGCTGGAC |
| | | TCCGACGGCTCCTTCTTCCTCTACAGCAGGCTA |
| | | ACCGTGGACAAGAGCAGGTGGCAGGAGGGGAAT |
| | | GTCTTCTCATGCTCCGTGATGCATGAGGCTCTG |
| | | CACAACCACTACACACAGAAGAGCCTCTCCCTG |
| | | TCTCTGGGTAAA |

BAP049-hum06 LC

| | | |
|---|---|---|
| SEQ ID NO: 146 (Kabat) | LCDR1 | KSSQSLLDSGNQKNFLT |
| SEQ ID NO: 147 (Kabat) | LCDR2 | WASTRES |
| SEQ ID NO: 166 (Kabat) | LCDR3 | QNDYSYPYT |
| SEQ ID NO: 149 (Chothia) | LCDR1 | SQSLLDSGNQKNF |
| SEQ ID NO: 150 (Chothia) | LCDR2 | WAS |
| SEQ ID NO: 167 (Chothia) | LCDR3 | DYSYPY |
| SEQ ID NO: 192 | VL | DIVMTQTPLSLPVTPGEPASISCKSSQSLLDSG |
| | | NQKNFLTWYQQKPGQAPRLLIYWASTRESGVPS |
| | | RFSGSGSGTDFTFTISSLEAEDAATYYCQNDYS |
| | | YPYTFGQGTKVEIK |
| SEQ ID NO: 193 | DNA VL | GATATTGTGATGACCCAGACTCCACTCTCCCTG |
| | | CCCGTCACCCCTGGAGAGCCGGCCTCCATCTCC |
| | | TGCAAGTCCAGTCAGAGTCTGTTAGACAGTGGA |
| | | AATCAAAAGAACTTCTTGACCTGGTACCAGCAG |
| | | AAACCTGGCCAGGCTCCCAGGCTCCTCATCTAT |
| | | TGGGCATCCACTAGGGAATCTGGGGTCCCCTCG |
| | | AGGTTCAGTGGCAGTGGATCTGGGACAGATTTC |
| | | ACCTTTACCATCAGTAGCCTGGAAGCTGAAGAT |
| | | GCTGCAACATATTACTGTCAGAATGATTATAGT |
| | | TATCCGTACACGTTCGGCCAAGGGACCAAGGTG |
| | | GAAATCAAA |
| SEQ ID NO: 194 | LC | DIVMTQTPLSLPVTPGEPASISCKSSQSLLDSG |
| | | NQKNFLTWYQQKPGQAPRLLIYWASTRESGVPS |
| | | RFSGSGSGTDFTFTISSLEAEDAATYYCQNDYS |
| | | YPYTFGQGTKVEIKRTVAAPSVFIFPPSDEQLK |
| | | SGTASVVCLLNNFYPREAKVQWKVDNALQSGNS |
| | | QESVTEQDSKDSTYSLSSTLTLSKADYEKHKVY |
| | | ACEVTHQGLSSPVTKSFNRGEC |
| SEQ ID NO: 195 | DNA LC | GATATTGTGATGACCCAGACTCCACTCTCCCTG |
| | | CCCGTCACCCCTGGAGAGCCGGCCTCCATCTCC |
| | | TGCAAGTCCAGTCAGAGTCTGTTAGACAGTGGA |
| | | AATCAAAAGAACTTCTTGACCTGGTACCAGCAG |
| | | AAACCTGGCCAGGCTCCCAGGCTCCTCATCTAT |
| | | TGGGCATCCACTAGGGAATCTGGGGTCCCCTCG |
| | | AGGTTCAGTGGCAGTGGATCTGGGACAGATTTC |
| | | ACCTTTACCATCAGTAGCCTGGAAGCTGAAGAT |
| | | GCTGCAACATATTACTGTCAGAATGATTATAGT |
| | | TATCCGTACACGTTCGGCCAAGGGACCAAGGTG |
| | | GAAATCAAACGTACGGTGGCTGCACCATCTGTC |
| | | TTCATCTTCCCGCCATCTGATGAGCAGTTGAAA |
| | | TCTGGAACTGCCTCTGTTGTGTGCCTGCTGAAT |
| | | AACTTCTATCCCAGAGAGGCCAAAGTACAGTGG |
| | | AAGGTGGATAACGCCCTCCAATCGGGTAACTCC |
| | | CAGGAGAGTGTCACAGAGCAGGACAGCAAGGAC |
| | | AGCACCTACAGCCTCAGCAGCACCCTGACGCTG |
| | | AGCAAAGCAGACTACGAGAAACACAAAGTCTAC |
| | | GCCTGCGAAGTCACCCATCAGGGCCTGAGCTCG |
| | | CCCGTCACAAAGAGCTTCAACAGGGGAGAGTGT |

BAP049-hum07 HC

| | | |
|---|---|---|
| SEQ ID NO: 137 (Kabat) | HCDR1 | TYWMH |
| SEQ ID NO: 138 (Kabat) | HCDR2 | NIYPGTGGSNFDEKFKN |
| SEQ ID NO: 139 (Kabat) | HCDR3 | WTTGTGAY |
| SEQ ID NO: 140 (Chothia) | HCDR1 | GYTFTTY |
| SEQ ID NO: 141 (Chothia) | HCDR2 | YPGTGG |
| SEQ ID NO: 139 (Chothia) | HCDR3 | WTTGTGAY |
| SEQ ID NO: 172 | VH | EVQLVQSGAEVKKPGESLRISCKGSGYTFTTYW |
| | | MHWVRQATGQGLEWMGNIYPGTGGSNFDEKFKN |
| | | RVTITADKSTSTAYMELSSLRSEDTAVYYCTRW |
| | | TTGTGAYWGQGTTVTVSS |
| SEQ ID NO: 173 | DNA VH | GAAGTGCAGCTGGTGCAGTCTGGAGCAGAGGTG |
| | | AAAAAGCCCGGGGAGTCTCTGAGGATCTCCTGT |
| | | AAGGGTTCTGGCTACACATTCACCACTTACTGG |
| | | ATGCACTGGGTGCGACAGGCCACTGGACAAGGG |
| | | CTTGAGTGGATGGGTAATATTTATCCTGGTACT |
| | | GGTGGTTCTAACTTCGATGAGAAGTTCAAGAAC |
| | | AGAGTCACGATTACCGCGGACAAATCCACGAGC |
| | | ACAGCCTACATGGAGCTGAGCAGCCTGAGATCT |
| | | GAGGACACGGCCGTGTATTACTGTACAAGATGG |
| | | ACTACTGGGACGGGAGCTTATTGGGGCCAGGGC |
| | | ACCACCGTGACCGTGTCCTCC |
| SEQ ID NO: 174 | HC | EVQLVQSGAEVKKPGESLRISCKGSGYTFTTYW |
| | | MHWVRQATGQGLEWMGNIYPGTGGSNFDEKFKN |
| | | RVTITADKSTSTAYMELSSLRSEDTAVYYCTRW |
| | | TTGTGAYWGQGTTVTVSSASTKGPSVFPLAPCS |
| | | RSTSESTAALGCLVKDYFPEPVTVSWNSGALTS |
| | | GVHTFPAVLQSSGLYSLSSVVTVPSSSLGTKTY |
| | | TCNVDHKPSNTKVDKRVESKYGPPCPPCPAPEF |
| | | LGGPSVFLFPPKPKDTLMISRTPEVTCVVVDVS |
| | | QEDPEVQFNWYVDGVEVHNAKTKPREEQFNSTY |
| | | RVVSVLTVLHQDWLNGKEYKCKVSNKGLPSSIE |
| | | KTISKAKGQPREPQVYTLPPSQEEMTKNQVSLT |
| | | CLVKGFYPSDIAVEWESNGQPENNYKTTPPVLD |
| | | SDGSFFLYSRLTVDKSRWQEGNVFSCSVMHEAL |
| | | HNHYTQKSLSLSLGK |
| SEQ ID NO: 175 | DNA HC | GAAGTGCAGCTGGTGCAGTCTGGAGCAGAGGTG |
| | | AAAAAGCCCGGGGAGTCTCTGAGGATCTCCTGT |
| | | AAGGGTTCTGGCTACACATTCACCACTTACTGG |
| | | ATGCACTGGGTGCGACAGGCCACTGGACAAGGG |
| | | CTTGAGTGGATGGGTAATATTTATCCTGGTACT |
| | | GGTGGTTCTAACTTCGATGAGAAGTTCAAGAAC |
| | | AGAGTCACGATTACCGCGGACAAATCCACGAGC |
| | | ACAGCCTACATGGAGCTGAGCAGCCTGAGATCT |
| | | GAGGACACGGCCGTGTATTACTGTACAAGATGG |
| | | ACTACTGGGACGGGAGCTTATTGGGGCCAGGGC |
| | | ACCACCGTGACCGTGTCCTCCGCTTCCACCAAG |
| | | GGCCCATCCGTCTTCCCCCTGGCGCCCTGCTCC |
| | | AGGAGCACCTCCGAGAGCACAGCCGCCCTGGGC |
| | | TGCCTGGTCAAGGACTACTTCCCCGAACCGGTG |
| | | ACGGTGTCGTGGAACTCAGGCGCCCTGACCAGC |
| | | GGCGTGCACACCTTCCCGGCTGTCCTACAGTCC |
| | | TCAGGACTCTACTCCCTCAGCAGCGTGGTGACC |
| | | GTGCCCTCCAGCAGCTTGGGCACGAAGACCTAC |
| | | ACCTGCAACGTAGATCACAAGCCCAGCAACACC |
| | | AAGGTGGACAAGAGAGTTGAGTCCAAATATGGT |
| | | CCCCCATGCCCACCGTGCCCAGCACCTGAGTTC |
| | | CTGGGGGGACCATCAGTCTTCCTGTTCCCCCCA |
| | | AAACCCAAGGACACTCTCATGATCTCCCGGACC |
| | | CCTGAGGTCACGTGCGTGGTGGTGGACGTGAGC |
| | | CAGGAAGACCCCGAGGTCCAGTTCAACTGGTAC |
| | | GTGGATGGCGTGGAGGTGCATAATGCCAAGACA |
| | | AAGCCGCGGGAGGAGCAGTTCAACAGCACGTAC |
| | | CGTGTGGTCAGCGTCCTCACCGTCCTGCACCAG |
| | | GACTGGCTGAACGGCAAGGAGTACAAGTGCAAG |
| | | GTGTCCAACAAAGGCCTCCCGTCCTCCATCGAG |
| | | AAAACCATCTCCAAAGCCAAAGGGCAGCCCCGA |
| | | GAGCCACAGGTGTACACCCTGCCCCCATCCCAG |
| | | GAGGAGATGACCAAGAACCAGGTCAGCCTGACC |
| | | TGCCTGGTCAAAGGCTTCTACCCCAGCGACATC |
| | | GCCGTGGAGTGGGAGAGCAATGGGCAGCCGGAG |
| | | AACAACTACAAGACCACGCCTCCCGTGCTGGAC |
| | | TCCGACGGCTCCTTCTTCCTCTACAGCAGGCTA |
| | | ACCGTGGACAAGAGCAGGTGGCAGGAGGGGAAT |
| | | GTCTTCTCATGCTCCGTGATGCATGAGGCTCTG |
| | | CACAACCACTACACACAGAAGAGCCTCTCCCTG |
| | | TCTCTGGGTAAA |

BAP049-hum07 LC

| | | |
|---|---|---|
| SEQ ID NO: 146 (Kabat) | LCDR1 | KSSQSLLDSGNQKNFLT |
| SEQ ID NO: 147 (Kabat) | LCDR2 | WASTRES |
| SEQ ID NO: 166 (Kabat) | LCDR3 | QNDYSYPYT |
| SEQ ID NO: 149 (Chothia) | LCDR1 | SQSLLDSGNQKNF |
| SEQ ID NO: 150 (Chothia) | LCDR2 | WAS |
| SEQ ID NO: 167 (Chothia) | LCDR3 | DYSYPY |
| SEQ ID NO: 196 | VL | EIVLTQSPATLSLSPGERATLSCKSSQSLLDSG |
| | | NQKNFLTWYQQKPGKAPKLLIYWASTRESGVPS |
| | | RFSGSGSGTDFTFTISSLEAEDAATYYCQNDYS |
| | | YPYTFGQGTKVEIK |
| SEQ ID NO: 197 | DNA VL | GAAATTGTGTTGACACAGTCTCCAGCCACCCTG |
| | | TCTTTGTCTCCAGGGGAAAGAGCCACCCTCTCC |
| | | TGCAAGTCCAGTCAGAGTCTGTTAGACAGTGGA |
| | | AATCAAAAGAACTTCTTGACCTGGTATCAGCAG |
| | | AAACCAGGGAAAGCTCCTAAGCTCCTGATCTAT |
| | | TGGGCATCCACTAGGGAATCTGGGGTCCCCTCG |
| | | AGGTTCAGTGGCAGTGGATCTGGGACAGATTTC |
| | | ACCTTTACCATCAGTAGCCTGGAAGCTGAAGAT |
| | | GCTGCAACATATTACTGTCAGAATGATTATAGT |
| | | TATCCGTACACGTTCGGCCAAGGGACCAAGGTG |
| | | GAAATCAAA |
| SEQ ID NO: 198 | LC | EIVLTQSPATLSLSPGERATLSCKSSQSLLDSG |
| | | NQKNFLTWYQQKPGKAPKLLIYWASTRESGVPS |
| | | RFSGSGSGTDFTFTISSLEAEDAATYYCQNDYS |
| | | YPYTFGQGTKVEIKRTVAAPSVFIFPPSDEQLK |
| | | SGTASVVCLLNNFYPREAKVQWKVDNALQSGNS |
| | | QESVTEQDSKDSTYSLSSTLTLSKADYEKHKVY |
| | | ACEVTHQGLSSPVTKSFNRGEC |
| SEQ ID NO: 199 | DNA LC | GAAATTGTGTTGACACAGTCTCCAGCCACCCTG |
| | | TCTTTGTCTCCAGGGGAAAGAGCCACCCTCTCC |
| | | TGCAAGTCCAGTCAGAGTCTGTTAGACAGTGGA |
| | | AATCAAAAGAACTTCTTGACCTGGTATCAGCAG |
| | | AAACCAGGGAAAGCTCCTAAGCTCCTGATCTAT |
| | | TGGGCATCCACTAGGGAATCTGGGGTCCCCTCG |
| | | AGGTTCAGTGGCAGTGGATCTGGGACAGATTTC |
| | | ACCTTTACCATCAGTAGCCTGGAAGCTGAAGAT |
| | | GCTGCAACATATTACTGTCAGAATGATTATAGT |
| | | TATCCGTACACGTTCGGCCAAGGGACCAAGGTG |
| | | GAAATCAAACGTACGGTGGCTGCACCATCTGTC |
| | | TTCATCTTCCCGCCATCTGATGAGCAGTTGAAA |
| | | TCTGGAACTGCCTCTGTTGTGTGCCTGCTGAAT |
| | | AACTTCTATCCCAGAGAGGCCAAAGTACAGTGG |
| | | AAGGTGGATAACGCCCTCCAATCGGGTAACTCC |
| | | CAGGAGAGTGTCACAGAGCAGGACAGCAAGGAC |
| | | AGCACCTACAGCCTCAGCAGCACCCTGACGCTG |
| | | AGCAAAGCAGACTACGAGAAACACAAAGTCTAC |
| | | GCCTGCGAAGTCACCCATCAGGGCCTGAGCTCG |
| | | CCCGTCACAAAGAGCTTCAACAGGGGAGAGTGT |

BAP049-hum08 HC

| | | |
|---|---|---|
| SEQ ID NO: 137 (Kabat) | HCDR1 | TYWMH |
| SEQ ID NO: 138 (Kabat) | HCDR2 | NIYPGTGGSNFDEKFKN |
| SEQ ID NO: 139 (Kabat) | HCDR3 | WTTGTGAY |
| SEQ ID NO: 140 (Chothia) | HCDR1 | GYTFTTY |
| SEQ ID NO: 141 (Chothia) | HCDR2 | YPGTGG |
| SEQ ID NO: 139 (Chothia) | HCDR3 | WTTGTGAY |
| SEQ ID NO: 184 | VH | EVQLVQSGAEVKKPGESLRISCKGSGYTFTTYW |
| | | MHWIRQSPSRGLEWLGNIYPGTGGSNFDEKFKN |
| | | RFTISRDNSKNTLYLQMNSLRAEDTAVYYCTRW |
| | | TTGTGAYWGQGTTVTVSS |
| SEQ ID NO: 185 | DNA VH | GAAGTGCAGCTGGTGCAGTCTGGAGCAGAGGTG |
| | | AAAAAGCCCGGGGAGTCTCTGAGGATCTCCTGT |
| | | AAGGGTTCTGGCTACACATTCACCACTTACTGG |
| | | ATGCACTGGATCAGGCAGTCCCCATCGAGAGGC |
| | | CTTGAGTGGCTGGGTAATATTTATCCTGGTACT |
| | | GGTGGTTCTAACTTCGATGAGAAGTTCAAGAAC |
| | | AGATTCACCATCTCCAGAGACAATTCCAAGAAC |
| | | ACGCTGTATCTTCAAATGAACAGCCTGAGAGCC |
| | | GAGGACACGGCCGTGTATTACTGTACAAGATGG |
| | | ACTACTGGGACGGGAGCTTATTGGGGCCAGGGC |
| | | ACCACCGTGACCGTGTCCTCC |
| SEQ ID NO: 186 | HC | EVQLVQSGAEVKKPGESLRISCKGSGYTFTTYW |
| | | MHWIRQSPSRGLEWLGNIYPGTGGSNFDEKFKN |
| | | RFTISRDNSKNTLYLQMNSLRAEDTAVYYCTRW |
| | | TTGTGAYWGQGTTVTVSSASTKGPSVFPLAPCS |
| | | RSTSESTAALGCLVKDYFPEPVTVSWNSGALTS |
| | | GVHTFPAVLQSSGLYSLSSVVTVPSSSLGTKTY |
| | | TCNVDHKPSNTKVDKRVESKYGPPCPPCPAPEF |
| | | LGGPSVFLFPPKPKDTLMISRTPEVTCVVVDVS |
| | | QEDPEVQFNWYVDGVEVHNAKTKPREEQFNSTY |
| | | RVVSVLTVLHQDWLNGKEYKCKVSNKGLPSSIE |
| | | KTISKAKGQPREPQVYTLPPSQEEMTKNQVSLT |
| | | CLVKGFYPSDIAVEWESNGQPENNYKTTPPVLD |
| | | SDGSFFLYSRLTVDKSRWQEGNVFSCSVMHEAL |
| | | HNHYTQKSLSLSLGK |
| SEQ ID NO: 187 | DNA HC | GAAGTGCAGCTGGTGCAGTCTGGAGCAGAGGTG |
| | | AAAAAGCCCGGGGAGTCTCTGAGGATCTCCTGT |
| | | AAGGGTTCTGGCTACACATTCACCACTTACTGG |
| | | ATGCACTGGATCAGGCAGTCCCCATCGAGAGGC |
| | | CTTGAGTGGCTGGGTAATATTTATCCTGGTACT |
| | | GGTGGTTCTAACTTCGATGAGAAGTTCAAGAAC |
| | | AGATTCACCATCTCCAGAGACAATTCCAAGAAC |
| | | ACGCTGTATCTTCAAATGAACAGCCTGAGAGCC |
| | | GAGGACACGGCCGTGTATTACTGTACAAGATGG |
| | | ACTACTGGGACGGGAGCTTATTGGGGCCAGGGC |
| | | ACCACCGTGACCGTGTCCTCCGCTTCCACCAAG |
| | | GGCCCATCCGTCTTCCCCCTGGCGCCCTGCTCC |
| | | AGGAGCACCTCCGAGAGCACAGCCGCCCTGGGC |
| | | TGCCTGGTCAAGGACTACTTCCCCGAACCGGTG |
| | | ACGGTGTCGTGGAACTCAGGCGCCCTGACCAGC |
| | | GGCGTGCACACCTTCCCGGCTGTCCTACAGTCC |
| | | TCAGGACTCTACTCCCTCAGCAGCGTGGTGACC |
| | | GTGCCCTCCAGCAGCTTGGGCACGAAGACCTAC |
| | | ACCTGCAACGTAGATCACAAGCCCAGCAACACC |
| | | AAGGTGGACAAGAGAGTTGAGTCCAAATATGGT |
| | | CCCCCATGCCCACCGTGCCCAGCACCTGAGTTC |
| | | CTGGGGGGACCATCAGTCTTCCTGTTCCCCCCA |
| | | AAACCCAAGGACACTCTCATGATCTCCCGGACC |
| | | CCTGAGGTCACGTGCGTGGTGGTGGACGTGAGC |
| | | CAGGAAGACCCCGAGGTCCAGTTCAACTGGTAC |
| | | GTGGATGGCGTGGAGGTGCATAATGCCAAGACA |
| | | AAGCCGCGGGAGGAGCAGTTCAACAGCACGTAC |
| | | CGTGTGGTCAGCGTCCTCACCGTCCTGCACCAG |
| | | GACTGGCTGAACGGCAAGGAGTACAAGTGCAAG |
| | | GTGTCCAACAAAGGCCTCCCGTCCTCCATCGAG |
| | | AAAACCATCTCCAAAGCCAAAGGGCAGCCCCGA |
| | | GAGCCACAGGTGTACACCCTGCCCCCATCCCAG |
| | | GAGGAGATGACCAAGAACCAGGTCAGCCTGACC |
| | | TGCCTGGTCAAAGGCTTCTACCCCAGCGACATC |
| | | GCCGTGGAGTGGGAGAGCAATGGGCAGCCGGAG |
| | | AACAACTACAAGACCACGCCTCCCGTGCTGGAC |
| | | TCCGACGGCTCCTTCTTCCTCTACAGCAGGCTA |
| | | ACCGTGGACAAGAGCAGGTGGCAGGAGGGGAAT |
| | | GTCTTCTCATGCTCCGTGATGCATGAGGCTCTG |
| | | CACAACCACTACACACAGAAGAGCCTCTCCCTG |
| | | TCTCTGGGTAAA |

BAP049-hum08 LC

| | | |
|---|---|---|
| SEQ ID NO: 146 (Kabat) | LCDR1 | KSSQSLLDSGNQKNFLT |
| SEQ ID NO: 147 (Kabat) | LCDR2 | WASTRES |
| SEQ ID NO: 166 (Kabat) | LCDR3 | QNDYSYPYT |
| SEQ ID NO: 149 (Chothia) | LCDR1 | SQSLLDSGNQKNF |
| SEQ ID NO: 150 (Chothia) | LCDR2 | WAS |
| SEQ ID NO: 167 (Chothia) | LCDR3 | DYSYPY |
| SEQ ID NO: 200 | VL | EIVLTQSPDFQSVTPKEKVTITCKSSQSLLDSG |
| | | NQKNFLTWYQQKPGQAPRLLIYWASTRESGVPS |
| | | RFSGSGSGTDFTFTISSLEAEDAATYYCQNDYS |
| | | YPYTFGQGTKVEIK |
| SEQ ID NO: 201 | DNA VL | GAAATTGTGCTGACTCAGTCTCCAGACTTTCAG |
| | | TCTGTGACTCCAAAGGAGAAAGTCACCATCACC |
| | | TGCAAGTCCAGTCAGAGTCTGTTAGACAGTGGA |
| | | AATCAAAAGAACTTCTTGACCTGGTACCAGCAG |
| | | AAACCTGGCCAGGCTCCCAGGCTCCTCATCTAT |
| | | TGGGCATCCACTAGGGAATCTGGGGTCCCCTCG |
| | | AGGTTCAGTGGCAGTGGATCTGGGACAGATTTC |
| | | ACCTTTACCATCAGTAGCCTGGAAGCTGAAGAT |
| | | GCTGCAACATATTACTGTCAGAATGATTATAGT |
| | | TATCCGTACACGTTCGGCCAAGGGACCAAGGTG |
| | | GAAATCAAA |
| SEQ ID NO: 202 | LC | EIVLTQSPDFQSVTPKEKVTITCKSSQSLLDSG |
| | | NQKNFLTWYQQKPGQAPRLLIYWASTRESGVPS |
| | | RFSGSGSGTDFTFTISSLEAEDAATYYCQNDYS |
| | | YPYTFGQGTKVEIKRTVAAPSVFIFPPSDEQLK |
| | | SGTASVVCLLNNFYPREAKVQWKVDNALQSGNS |
| | | QESVTEQDSKDSTYSLSSTLTLSKADYEKHKVY |
| | | ACEVTHQGLSSPVTKSFNRGEC |
| SEQ ID NO: 203 | DNA LC | GAAATTGTGCTGACTCAGTCTCCAGACTTTCAG |
| | | TCTGTGACTCCAAAGGAGAAAGTCACCATCACC |
| | | TGCAAGTCCAGTCAGAGTCTGTTAGACAGTGGA |
| | | AATCAAAAGAACTTCTTGACCTGGTACCAGCAG |
| | | AAACCTGGCCAGGCTCCCAGGCTCCTCATCTAT |
| | | TGGGCATCCACTAGGGAATCTGGGGTCCCCTCG |
| | | AGGTTCAGTGGCAGTGGATCTGGGACAGATTTC |
| | | ACCTTTACCATCAGTAGCCTGGAAGCTGAAGAT |
| | | GCTGCAACATATTACTGTCAGAATGATTATAGT |
| | | TATCCGTACACGTTCGGCCAAGGGACCAAGGTG |
| | | GAAATCAAACGTACGGTGGCTGCACCATCTGTC |
| | | TTCATCTTCCCGCCATCTGATGAGCAGTTGAAA |
| | | TCTGGAACTGCCTCTGTTGTGTGCCTGCTGAAT |
| | | AACTTCTATCCCAGAGAGGCCAAAGTACAGTGG |
| | | AAGGTGGATAACGCCCTCCAATCGGGTAACTCC |
| | | CAGGAGAGTGTCACAGAGCAGGACAGCAAGGAC |
| | | AGCACCTACAGCCTCAGCAGCACCCTGACGCTG |
| | | AGCAAAGCAGACTACGAGAAACACAAAGTCTAC |
| | | GCCTGCGAAGTCACCCATCAGGGCCTGAGCTCG |
| | | CCCGTCACAAAGAGCTTCAACAGGGGAGAGTGT |

BAP049-hum09 HC

| | | |
|---|---|---|
| SEQ ID NO: 137 (Kabat) | HCDR1 | TYWMH |
| SEQ ID NO: 138 (Kabat) | HCDR2 | NIYPGTGGSNFDEKFKN |
| SEQ ID NO: 139 (Kabat) | HCDR3 | WTTGTGAY |
| SEQ ID NO: 140 (Chothia) | HCDR1 | GYTFTTY |
| SEQ ID NO: 141 (Chothia) | HCDR2 | YPGTGG |
| SEQ ID NO: 139 (Chothia) | HCDR3 | WTTGTGAY |
| SEQ ID NO: 172 | VH | EVQLVQSGAEVKKPGESLRISCKGSGYTFTTYW |
| | | MHWVRQATGQGLEWMGNIYPGTGGSNFDEKFKN |
| | | RVTITADKSTSTAYMELSSLRSEDTAVYYCTRW |
| | | TTGTGAYWGQGTTVTVSS |
| SEQ ID NO: 173 | DNA VH | GAAGTGCAGCTGGTGCAGTCTGGAGCAGAGGTG |
| | | AAAAAGCCCGGGGAGTCTCTGAGGATCTCCTGT |
| | | AAGGGTTCTGGCTACACATTCACCACTTACTGG |
| | | ATGCACTGGGTGCGACAGGCCACTGGACAAGGG |
| | | CTTGAGTGGATGGGTAATATTTATCCTGGTACT |
| | | GGTGGTTCTAACTTCGATGAGAAGTTCAAGAAC |
| | | AGAGTCACGATTACCGCGGACAAATCCACGAGC |
| | | ACAGCCTACATGGAGCTGAGCAGCCTGAGATCT |
| | | GAGGACACGGCCGTGTATTACTGTACAAGATGG |
| | | ACTACTGGGACGGGAGCTTATTGGGGCCAGGGC |
| | | ACCACCGTGACCGTGTCCTCC |
| SEQ ID NO: 174 | HC | EVQLVQSGAEVKKPGESLRISCKGSGYTFTTYW |
| | | MHWVRQATGQGLEWMGNIYPGTGGSNFDEKFKN |
| | | RVTITADKSTSTAYMELSSLRSEDTAVYYCTRW |
| | | TTGTGAYWGQGTTVTVSSASTKGPSVFPLAPCS |
| | | RSTSESTAALGCLVKDYFPEPVTVSWNSGALTS |
| | | GVHTFPAVLQSSGLYSLSSVVTVPSSSLGTKTY |
| | | TCNVDHKPSNTKVDKRVESKYGPPCPPCPAPEF |
| | | LGGPSVFLFPPKPKDTLMISRTPEVTCVVVDVS |
| | | QEDPEVQFNWYVDGVEVHNAKTKPREEQFNSTY |
| | | RVVSVLTVLHQDWLNGKEYKCKVSNKGLPSSIE |
| | | KTISKAKGQPREPQVYTLPPSQEEMTKNQVSLT |
| | | CLVKGFYPSDIAVEWESNGQPENNYKTTPPVLD |
| | | SDGSFFLYSRLTVDKSRWQEGNVFSCSVMHEAL |
| | | HNHYTQKSLSLSLGK |
| SEQ ID NO: 175 | DNA HC | GAAGTGCAGCTGGTGCAGTCTGGAGCAGAGGTG |
| | | AAAAAGCCCGGGGAGTCTCTGAGGATCTCCTGT |
| | | AAGGGTTCTGGCTACACATTCACCACTTACTGG |
| | | ATGCACTGGGTGCGACAGGCCACTGGACAAGGG |
| | | CTTGAGTGGATGGGTAATATTTATCCTGGTACT |
| | | GGTGGTTCTAACTTCGATGAGAAGTTCAAGAAC |
| | | AGAGTCACGATTACCGCGGACAAATCCACGAGC |
| | | ACAGCCTACATGGAGCTGAGCAGCCTGAGATCT |
| | | GAGGACACGGCCGTGTATTACTGTACAAGATGG |
| | | ACTACTGGGACGGGAGCTTATTGGGGCCAGGGC |
| | | ACCACCGTGACCGTGTCCTCCGCTTCCACCAAG |
| | | GGCCCATCCGTCTTCCCCCTGGCGCCCTGCTCC |
| | | AGGAGCACCTCCGAGAGCACAGCCGCCCTGGGC |
| | | TGCCTGGTCAAGGACTACTTCCCCGAACCGGTG |
| | | ACGGTGTCGTGGAACTCAGGCGCCCTGACCAGC |
| | | GGCGTGCACACCTTCCCGGCTGTCCTACAGTCC |
| | | TCAGGACTCTACTCCCTCAGCAGCGTGGTGACC |
| | | GTGCCCTCCAGCAGCTTGGGCACGAAGACCTAC |
| | | ACCTGCAACGTAGATCACAAGCCCAGCAACACC |
| | | AAGGTGGACAAGAGAGTTGAGTCCAAATATGGT |
| | | CCCCCATGCCCACCGTGCCCAGCACCTGAGTTC |
| | | CTGGGGGGACCATCAGTCTTCCTGTTCCCCCCA |
| | | AAACCCAAGGACACTCTCATGATCTCCCGGACC |
| | | CCTGAGGTCACGTGCGTGGTGGTGGACGTGAGC |
| | | CAGGAAGACCCCGAGGTCCAGTTCAACTGGTAC |
| | | GTGGATGGCGTGGAGGTGCATAATGCCAAGACA |
| | | AAGCCGCGGGAGGAGCAGTTCAACAGCACGTAC |
| | | CGTGTGGTCAGCGTCCTCACCGTCCTGCACCAG |
| | | GACTGGCTGAACGGCAAGGAGTACAAGTGCAAG |
| | | GTGTCCAACAAAGGCCTCCCGTCCTCCATCGAG |
| | | AAAACCATCTCCAAAGCCAAAGGGCAGCCCCGA |
| | | GAGCCACAGGTGTACACCCTGCCCCCATCCCAG |
| | | GAGGAGATGACCAAGAACCAGGTCAGCCTGACC |
| | | TGCCTGGTCAAAGGCTTCTACCCCAGCGACATC |
| | | GCCGTGGAGTGGGAGAGCAATGGGCAGCCGGAG |
| | | AACAACTACAAGACCACGCCTCCCGTGCTGGAC |
| | | TCCGACGGCTCCTTCTTCCTCTACAGCAGGCTA |
| | | ACCGTGGACAAGAGCAGGTGGCAGGAGGGGAAT |
| | | GTCTTCTCATGCTCCGTGATGCATGAGGCTCTG |
| | | CACAACCACTACACACAGAAGAGCCTCTCCCTG |
| | | TCTCTGGGTAAA |

BAP049-hum09 LC

| | | |
|---|---|---|
| SEQ ID NO: 146 (Kabat) | LCDR1 | KSSQSLLDSGNQKNFLT |
| SEQ ID NO: 147 (Kabat) | LCDR2 | WASTRES |
| SEQ ID NO: 166 (Kabat) | LCDR3 | QNDYSYPYT |
| SEQ ID NO: 149 (Chothia) | LCDR1 | SQSLLDSGNQKNF |
| SEQ ID NO: 150 (Chothia) | LCDR2 | WAS |
| SEQ ID NO: 167 (Chothia) | LCDR3 | DYSYPY |
| SEQ ID NO: 200 | VL | EIVLTQSPDFQSVTPKEKVTITCKSSQSLLDSG |
| | | NQKNFLTWYQQKPGQAPRLLIYWASTRESGVPS |
| | | RFSGSGSGTDFTFTISSLEAEDAATYYCQNDYS |
| | | YPYTFGQGTKVEIK |
| SEQ ID NO: 201 | DNA VL | GAAATTGTGCTGACTCAGTCTCCAGACTTTCAG |
| | | TCTGTGACTCCAAAGGAGAAAGTCACCATCACC |
| | | TGCAAGTCCAGTCAGAGTCTGTTAGACAGTGGA |
| | | AATCAAAAGAACTTCTTGACCTGGTACCAGCAG |
| | | AAACCTGGCCAGGCTCCCAGGCTCCTCATCTAT |
| | | TGGGCATCCACTAGGGAATCTGGGGTCCCCTCG |
| | | AGGTTCAGTGGCAGTGGATCTGGGACAGATTTC |
| | | ACCTTTACCATCAGTAGCCTGGAAGCTGAAGAT |
| | | GCTGCAACATATTACTGTCAGAATGATTATAGT |
| | | TATCCGTACACGTTCGGCCAAGGGACCAAGGTG |
| | | GAAATCAAA |
| SEQ ID NO: 202 | LC | EIVLTQSPDFQSVTPKEKVTITCKSSQSLLDSG |
| | | NQKNFLTWYQQKPGQAPRLLIYWASTRESGVPS |
| | | RFSGSGSGTDFTFTISSLEAEDAATYYCQNDYS |
| | | YPYTFGQGTKVEIKRTVAAPSVFIFPPSDEQLK |
| | | SGTASVVCLLNNFYPREAKVQWKVDNALQSGNS |
| | | QESVTEQDSKDSTYSLSSTLTLSKADYEKHKVY |
| | | ACEVTHQGLSSPVTKSFNRGEC |
| SEQ ID NO: 203 | DNA LC | GAAATTGTGCTGACTCAGTCTCCAGACTTTCAG |
| | | TCTGTGACTCCAAAGGAGAAAGTCACCATCACC |
| | | TGCAAGTCCAGTCAGAGTCTGTTAGACAGTGGA |
| | | AATCAAAAGAACTTCTTGACCTGGTACCAGCAG |
| | | AAACCTGGCCAGGCTCCCAGGCTCCTCATCTAT |
| | | TGGGCATCCACTAGGGAATCTGGGGTCCCCTCG |
| | | AGGTTCAGTGGCAGTGGATCTGGGACAGATTTC |
| | | ACCTTTACCATCAGTAGCCTGGAAGCTGAAGAT |
| | | GCTGCAACATATTACTGTCAGAATGATTATAGT |
| | | TATCCGTACACGTTCGGCCAAGGGACCAAGGTG |
| | | GAAATCAAACGTACGGTGGCTGCACCATCTGTC |
| | | TTCATCTTCCCGCCATCTGATGAGCAGTTGAAA |
| | | TCTGGAACTGCCTCTGTTGTGTGCCTGCTGAAT |
| | | AACTTCTATCCCAGAGAGGCCAAAGTACAGTGG |
| | | AAGGTGGATAACGCCCTCCAATCGGGTAACTCC |
| | | CAGGAGAGTGTCACAGAGCAGGACAGCAAGGAC |
| | | AGCACCTACAGCCTCAGCAGCACCCTGACGCTG |
| | | AGCAAAGCAGACTACGAGAAACACAAAGTCTAC |
| | | GCCTGCGAAGTCACCCATCAGGGCCTGAGCTCG |
| | | CCCGTCACAAAGAGCTTCAACAGGGGAGAGTGT |

BAP049-hum10 HC

| | | |
|---|---|---|
| SEQ ID NO: 137 (Kabat) | HCDR1 | TYWMH |
| SEQ ID NO: 138 (Kabat) | HCDR2 | NIYPGTGGSNFDEKFKN |
| SEQ ID NO: 139 (Kabat) | HCDR3 | WTTGTGAY |
| SEQ ID NO: 140 (Chothia) | HCDR1 | GYTFTTY |
| SEQ ID NO: 141 (Chothia) | HCDR2 | YPGTGG |
| SEQ ID NO: 139 (Chothia) | HCDR3 | WTTGTGAY |
| SEQ ID NO: 184 | VH | EVQLVQSGAEVKKPGESLRISCKGSGYTFTTYW |
| | | MHWIRQSPSRGLEWLGNIYPGTGGSNFDEKFKN |
| | | RFTISRDNSKNTLYLQMNSLRAEDTAVYYCTRW |
| | | TTGTGAYWGQGTTVTVSS |
| SEQ ID NO: 185 | DNA VH | GAAGTGCAGCTGGTGCAGTCTGGAGCAGAGGTG |
| | | AAAAAGCCCGGGGAGTCTCTGAGGATCTCCTGT |
| | | AAGGGTTCTGGCTACACATTCACCACTTACTGG |
| | | ATGCACTGGATCAGGCAGTCCCCATCGAGAGGC |
| | | CTTGAGTGGCTGGGTAATATTTATCCTGGTACT |
| | | GGTGGTTCTAACTTCGATGAGAAGTTCAAGAAC |
| | | AGATTCACCATCTCCAGAGACAATTCCAAGAAC |
| | | ACGCTGTATCTTCAAATGAACAGCCTGAGAGCC |
| | | GAGGACACGGCCGTGTATTACTGTACAAGATGG |
| | | ACTACTGGGACGGGAGCTTATTGGGGCCAGGGC |
| | | ACCACCGTGACCGTGTCCTCC |
| SEQ ID NO: 186 | HC | EVQLVQSGAEVKKPGESLRISCKGSGYTFTTYW |
| | | MHWIRQSPSRGLEWLGNIYPGTGGSNFDEFFKN |
| | | RFTISRDNSKNTLYLQMNSLRAEDTAVYYCTRW |
| | | TTGTGAYWGQGTTVTVSSASTKGPSVFPLAPCS |
| | | RSTSESTAALGCLVKDYFPEPVTVSWNSGALTS |
| | | GVHTFPAVLQSSGLYSLSSVVTVPSSSLGTKTY |
| | | TCNVDHEPSNTKVDKRVESKYGPPCPPCPAPEF |
| | | LGGPSVFLFPPKPKDTLMISRTPEVTCVVVDVS |
| | | QEDPEVQFNWYVDGVEVHNAKTKPREEQFNSTY |
| | | RVVSVLTVLHQDWLNGKEYECKVSNEGLPSSIE |
| | | KTISKAKGQPREPQVYTLPPSQEEMTKNQVSLT |
| | | CLVKGFYPSDIAVEWESNGQPENNYKTTPPVLD |
| | | SDGSFFLYSRLTVDKSRWQEGNVFSCSVMHEAL |
| | | HNHYTQKSLSLSLGE |
| SEQ ID NO: 187 | DNA HC | GAAGTGCAGCTGGTGCAGTCTGGAGCAGAGGTG |
| | | AAAAAGCCCGGGGAGTCTCTGAGGATCTCCTGT |
| | | AAGGGTTCTGGCTACACATTCACCACTTACTGG |
| | | ATGCACTGGATCAGGCAGTCCCCATCGAGAGGC |
| | | CTTGAGTGGCTGGGTAATATTTATCCTGGTACT |
| | | GGTGGTTCTAACTTCGATGAGAAGTTCAAGAAC |
| | | AGATTCACCATCTCCAGAGACAATTCCAAGAAC |
| | | ACGCTGTATCTTCAAATGAACAGCCTGAGAGCC |
| | | GAGGACACGGCCGTGTATTACTGTACAAGATGG |
| | | ACTACTGGGACGGGAGCTTATTGGGGCCAGGGC |
| | | ACCACCGTGACCGTGTCCTCCGCTTCCACCAAG |
| | | GGCCCATCCGTCTTCCCCCTGGCGCCCTGCTCC |
| | | AGGAGCACCTCCGAGAGCACAGCCGCCCTGGGC |
| | | TGCCTGGTCAAGGACTACTTCCCCGAACCGGTG |
| | | ACGGTGTCGTGGAACTCAGGCGCCCTGACCAGC |
| | | GGCGTGCACACCTTCCCGGCTGTCCTACAGTCC |
| | | TCAGGACTCTACTCCCTCAGCAGCGTGGTGACC |
| | | GTGCCCTCCAGCAGCTTGGGCACGAAGACCTAC |
| | | ACCTGCAACGTAGATCACAAGCCCAGCAACACC |
| | | AAGGTGGACAAGAGAGTTGAGTCCAAATATGGT |
| | | CCCCCATGCCCACCGTGCCCAGCACCTGAGTTC |
| | | CTGGGGGGACCATCAGTCTTCCTGTTCCCCCCA |
| | | AAACCCAAGGACACTCTCATGATCTCCCGGACC |
| | | CCTGAGGTCACGTGCGTGGTGGTGGACGTGAGC |
| | | CAGGAAGACCCCGAGGTCCAGTTCAACTGGTAC |
| | | GTGGATGGCGTGGAGGTGCATAATGCCAAGACA |
| | | AAGCCGCGGGAGGAGCAGTTCAACAGCACGTAC |
| | | CGTGTGGTCAGCGTCCTCACCGTCCTGCACCAG |
| | | GACTGGCTGAACGGCAAGGAGTACAAGTGCAAG |
| | | GTGTCCAACAAAGGCCTCCCGTCCTCCATCGAG |
| | | AAAACCATCTCCAAAGCCAAAGGGCAGCCCCGA |
| | | GAGCCACAGGTGTACACCCTGCCCCCATCCCAG |
| | | GAGGAGATGACCAAGAACCAGGTCAGCCTGACC |
| | | TGCCTGGTCAAAGGCTTCTACCCCAGCGACATC |
| | | GCCGTGGAGTGGGAGAGCAATGGGCAGCCGGAG |
| | | AACAACTACAAGACCACGCCTCCCGTGCTGGAC |
| | | TCCGACGGCTCCTTCTTCCTCTACAGCAGGCTA |
| | | ACCGTGGACAAGAGCAGGTGGCAGGAGGGGAAT |
| | | GTCTTCTCATGCTCCGTGATGCATGAGGCTCTG |
| | | CACAACCACTACACACAGAAGAGCCTCTCCCTG |
| | | TCTCTGGGTAAA |

BAP049-hum10 LC

| | | |
|---|---|---|
| SEQ ID NO: 146 (Kabat) | LCDR1 | KSSQSLLDSGNQKNFLT |
| SEQ ID NO: 147 (Kabat) | LCDR2 | WASTRES |
| SEQ ID NO: 166 (Kabat) | LCDR3 | QNDYSYPYT |
| SEQ ID NO: 149 (Chothia) | LCDR1 | SQSLLDSGNQKNF |
| SEQ ID NO: 150 (Chothia) | LCDR2 | WAS |
| SEQ ID NO: 167 (Chothia) | LCDR3 | DYSYPY |
| SEQ ID NO: 204 | VL | EIVLTQSPATLSLSPGERATLSCKSSQSLLDSG |
| | | NQKNFLTWYQQKPGQAPRLLIYWASTRESGVPS |
| | | RFSGSGSGTDFTFTISSLEAEDAATYYCQNDYS |
| | | YPYTFGQGTKVEIK |
| SEQ ID NO: 205 | DNA VL | GAAATTGTGTTGACACAGTCTCCAGCCACCCTG |
| | | TCTTTGTCTCCAGGGGAAAGAGCCACCCTCTCC |
| | | TGCAAGTCCAGTCAGAGTCTGTTAGACAGTGGA |
| | | AATCAAAAGAACTTCTTGACCTGGTACCAGCAG |
| | | AAACCTGGCCAGGCTCCCAGGCTCCTCATCTAT |
| | | TGGGCATCCACTAGGGAATCTGGGGTCCCCTCG |
| | | AGGTTCAGTGGCAGTGGATCTGGGACAGATTTC |
| | | ACCTTTACCATCAGTAGCCTGGAAGCTGAAGAT |
| | | GCTGCAACATATTACTGTCAGAATGATTATAGT |
| | | TATCCGTACACGTTCGGCCAAGGGACCAAGGTG |
| | | GAAATCAAA |
| SEQ ID NO: 206 | LC | EIVLTQSPATLSLSPGERATLSCKSSQSLLDSG |
| | | NQKNFLTWYQQKPGQAPRLLIYWASTRESGVPS |
| | | RFSGSGSGTDFTFTISSLEAEDAATYYCQNDYS |
| | | YPYTFGQGTKVEIKRTVAAPSVFIFPPSDEQLK |
| | | SGTASVVCLLNNFYPREAKVQWKVDNALQSGNS |
| | | QESVTEQDSKDSTYSLSSTLTLSKADYEKHKVY |
| | | ACEVTHQGLSSPVTKSFNRGEC |
| SEQ ID NO: 207 | DNA LC | GAAATTGTGTTGACACAGTCTCCAGCCACCCTG |
| | | TCTTTGTCTCCAGGGGAAAGAGCCACCCTCTCC |
| | | TGCAAGTCCAGTCAGAGTCTGTTAGACAGTGGA |
| | | AATCAAAAGAACTTCTTGACCTGGTACCAGCAG |
| | | AAACCTGGCCAGGCTCCCAGGCTCCTCATCTAT |
| | | TGGGCATCCACTAGGGAATCTGGGGTCCCCTCG |
| | | AGGTTCAGTGGCAGTGGATCTGGGACAGATTTC |
| | | ACCTTTACCATCAGTAGCCTGGAAGCTGAAGAT |
| | | GCTGCAACATATTACTGTCAGAATGATTATAGT |
| | | TATCCGTACACGTTCGGCCAAGGGACCAAGGTG |
| | | GAAATCAAACGTACGGTGGCTGCACCATCTGTC |
| | | TTCATCTTCCCGCCATCTGATGAGCAGTTGAAA |
| | | TCTGGAACTGCCTCTGTTGTGTGCCTGCTGAAT |
| | | AACTTCTATCCCAGAGAGGCCAAAGTACAGTGG |
| | | AAGGTGGATAACGCCCTCCAATCGGGTAACTCC |
| | | CAGGAGAGTGTCACAGAGCAGGACAGCAAGGAC |
| | | AGCACCTACAGCCTCAGCAGCACCCTGACGCTG |
| | | AGCAAAGCAGACTACGAGAAACACAAAGTCTAC |
| | | GCCTGCGAAGTCACCCATCAGGGCCTGAGCTCG |
| | | CCCGTCACAAAGAGCTTCAACAGGGGAGAGTGT |

BAP049-hum11 HC

| | | |
|---|---|---|
| SEQ ID NO: 137 (Kabat) | HCDR1 | TYWMH |
| SEQ ID NO: 138 (Kabat) | HCDR2 | NIYPGTGGSNFDEKFKN |
| SEQ ID NO: 139 (Kabat) | HCDR3 | WTTGTGAY |
| SEQ ID NO: 140 (Chothia) | HCDR1 | GYTFTTY |
| SEQ ID NO: 141 (Chothia) | HCDR2 | YPGTGG |
| SEQ ID NO: 139 (Chothia) | HCDR3 | WTTGTGAY |
| SEQ ID NO: 172 | VH | EVQLVQSGAEVKKPGESLRISCKGSGYTFTTYW |
| | | MHWVRQATGQGLEWMGNIYPGTGGSNFDEKFKN |
| | | RVTITADKSTSTAYMELSSLRSEDTAVYYCTRW |
| | | TTGTGAYWGQGTTVTVSS |
| SEQ ID NO: 173 | DNA VH | GAAGTGCAGCTGGTGCAGTCTGGAGCAGAGGTG |
| | | AAAAAGCCCGGGGAGTCTCTGAGGATCTCCTGT |
| | | AAGGGTTCTGGCTACACATTCACCACTTACTGG |
| | | ATGCACTGGGTGCGACAGGCCACTGGACAAGGG |
| | | CTTGAGTGGATGGGTAATATTTATCCTGGTACT |
| | | GGTGGTTCTAACTTCGATGAGAAGTTCAAGAAC |
| | | AGAGTCACGATTACCGCGGACAAATCCACGAGC |
| | | ACAGCCTACATGGAGCTGAGCAGCCTGAGATCT |
| | | GAGGACACGGCCGTGTATTACTGTACAAGATGG |
| | | ACTACTGGGACGGGAGCTTATTGGGGCCAGGGC |
| | | ACCACCGTGACCGTGTCCTCC |
| SEQ ID NO: 174 | HC | EVQLVQSGAEVKKPGESLRISCKGSGYTFTTYW |
| | | MHWVRQATGQGLEWMGNIYPGTGGSNFDEKFKN |
| | | RVTITADKSTSTAYMELSSLRSEDTAVYYCTRW |
| | | TTGTGAYWGQGTTVTVSSASTKGPSVFPLAPCS |
| | | RSTSESTAALGCLVKDYFPEPVTVSWNSGALTS |
| | | GVHTFPAVLQSSGLYSLSSVVTVPSSSLGTKTY |
| | | TCNVDHKPSNTKVDKRVESKYGPPCPPCPAPEF |
| | | LGGPSVFLFPPKPKDTLMISRTPEVTCVVVDVS |
| | | QEDPEVQFNWYVDGVEVHNAKTKPREEQFNSTY |
| | | RVVSVLTVLHQDWLNGKEYKCKVSNKGLPSSIE |
| | | KTISKAKGQPREPQVYTLPPSQEEMTKNQVSLT |
| | | CLVKGFYPSDIAVEWESNGQPENNYKTTPPVLD |
| | | SDGSFFLYSRLTVDKSRWQEGNVFSCSVMHEAL |
| | | HNHYTQKSLSLSLGK |
| SEQ ID NO: 175 | DNA HC | GAAGTGCAGCTGGTGCAGTCTGGAGCAGAGGTG |
| | | AAAAAGCCCGGGGAGTCTCTGAGGATCTCCTGT |
| | | AAGGGTTCTGGCTACACATTCACCACTTACTGG |
| | | ATGCACTGGGTGCGACAGGCCACTGGACAAGGG |
| | | CTTGAGTGGATGGGTAATATTTATCCTGGTACT |
| | | GGTGGTTCTAACTTCGATGAGAAGTTCAAGAAC |
| | | AGAGTCACGATTACCGCGGACAAATCCACGAGC |
| | | ACAGCCTACATGGAGCTGAGCAGCCTGAGATCT |
| | | GAGGACACGGCCGTGTATTACTGTACAAGATGG |
| | | ACTACTGGGACGGGAGCTTATTGGGGCCAGGGC |
| | | ACCACCGTGACCGTGTCCTCCGCTTCCACCAAG |
| | | GGCCCATCCGTCTTCCCCCTGGCGCCCTGCTCC |
| | | AGGAGCACCTCCGAGAGCACAGCCGCCCTGGGC |
| | | TGCCTGGTCAAGGACTACTTCCCCGAACCGGTG |
| | | ACGGTGTCGTGGAACTCAGGCGCCCTGACCAGC |
| | | GGCGTGCACACCTTCCCGGCTGTCCTACAGTCC |
| | | TCAGGACTCTACTCCCTCAGCAGCGTGGTGACC |
| | | GTGCCCTCCAGCAGCTTGGGCACGAAGACCTAC |
| | | ACCTGCAACGTAGATCACAAGCCCAGCAACACC |
| | | AAGGTGGACAAGAGAGTTGAGTCCAAATATGGT |
| | | CCCCCATGCCCACCGTGCCCAGCACCTGAGTTC |
| | | CTGGGGGGACCATCAGTCTTCCTGTTCCCCCCA |
| | | AAACCCAAGGACACTCTCATGATCTCCCGGACC |
| | | CCTGAGGTCACGTGCGTGGTGGTGGACGTGAGC |
| | | CAGGAAGACCCCGAGGTCCAGTTCAACTGGTAC |
| | | GTGGATGGCGTGGAGGTGCATAATGCCAAGACA |
| | | AAGCCGCGGGAGGAGCAGTTCAACAGCACGTAC |
| | | CGTGTGGTCAGCGTCCTCACCGTCCTGCACCAG |
| | | GACTGGCTGAACGGCAAGGAGTACAAGTGCAAG |
| | | GTGTCCAACAAAGGCCTCCCGTCCTCCATCGAG |
| | | AAAACCATCTCCAAAGCCAAAGGGCAGCCCCGA |
| | | GAGCCACAGGTGTACACCCTGCCCCCATCCCAG |
| | | GAGGAGATGACCAAGAACCAGGTCAGCCTGACC |
| | | TGCCTGGTCAAAGGCTTCTACCCCAGCGACATC |
| | | GCCGTGGAGTGGGAGAGCAATGGGCAGCCGGAG |
| | | AACAACTACAAGACCACGCCTCCCGTGCTGGAC |
| | | TCCGACGGCTCCTTCTTCCTCTACAGCAGGCTA |
| | | ACCGTGGACAAGAGCAGGTGGCAGGAGGGGAAT |
| | | GTCTTCTCATGCTCCGTGATGCATGAGGCTCTG |
| | | CACAACCACTACACACAGAAGAGCCTCTCCCTG |
| | | TCTCTGGGTAAA |

BAP049-hum11 LC

| | | |
|---|---|---|
| SEQ ID NO: 146 (Kabat) | LCDR1 | KSSQSLLDSGNQKNFLT |
| SEQ ID NO: 147 (Kabat) | LCDR2 | WASTRES |
| SEQ ID NO: 166 (Kabat) | LCDR3 | QNDYSYPYT |
| SEQ ID NO: 149 (Chothia) | LCDR1 | SQSLLDSGNQKNF |
| SEQ ID NO: 150 (Chothia) | LCDR2 | WAS |
| SEQ ID NO: 167 (Chothia) | LCDR3 | DYSYPY |
| SEQ ID NO: 204 | VL | EIVLTQSPATLSLSPGERATLSCKSSQSLLDSG |
| | | NQKNFLTWYQQKPGQAPRLLIYWASTRESGVPS |
| | | RFSGSGSGTDFTFTISSLEAEDAATYYCQNDYS |
| | | YPYTFGQGTKVEIK |
| SEQ ID NO: 205 | DNA VL | GAAATTGTGTTGACACAGTCTCCAGCCACCCTG |
| | | TCTTTGTCTCCAGGGGAAAGAGCCACCCTCTCC |
| | | TGCAAGTCCAGTCAGAGTCTGTTAGACAGTGGA |
| | | AATCAAAAGAACTTCTTGACCTGGTACCAGCAG |
| | | AAACCTGGCCAGGCTCCCAGGCTCCTCATCTAT |
| | | TGGGCATCCACTAGGGAATCTGGGGTCCCCTCG |
| | | AGGTTCAGTGGCAGTGGATCTGGGACAGATTTC |
| | | ACCTTTACCATCAGTAGCCTGGAAGCTGAAGAT |
| | | GCTGCAACATATTACTGTCAGAATGATTATAGT |
| | | TATCCGTACACGTTCGGCCAAGGGACCAAGGTG |
| | | GAAATCAAA |
| SEQ ID NO: 206 | LC | EIVLTQSPATLSLSPGERATLSCKSSQSLLDSG |
| | | NQKNFLTWYQQKPGQAPRLLIYWASTRESGVPS |
| | | RFSGSGSGTDFTFTISSLEAEDAATYYCQNDYS |
| | | YPYTFGQGTKVEIKRTVAAPSVFIFPPSDEQLK |
| | | SGTASVVCLLNNFYPREAKVQWKVDNALQSGNS |
| | | QESVTEQDSKDSTYSLSSTLTLSKADYEKHKVY |
| | | ACEVTHQGLSSPVTKSFNRGEC |
| SEQ ID NO: 207 | DNA LC | GAAATTGTGTTGACACAGTCTCCAGCCACCCTG |
| | | TCTTTGTCTCCAGGGGAAAGAGCCACCCTCTCC |
| | | TGCAAGTCCAGTCAGAGTCTGTTAGACAGTGGA |
| | | AATCAAAAGAACTTCTTGACCTGGTACCAGCAG |
| | | AAACCTGGCCAGGCTCCCAGGCTCCTCATCTAT |
| | | TGGGCATCCACTAGGGAATCTGGGGTCCCCTCG |
| | | AGGTTCAGTGGCAGTGGATCTGGGACAGATTTC |
| | | ACCTTTACCATCAGTAGCCTGGAAGCTGAAGAT |
| | | GCTGCAACATATTACTGTCAGAATGATTATAGT |
| | | TATCCGTACACGTTCGGCCAAGGGACCAAGGTG |
| | | GAAATCAAACGTACGGTGGCTGCACCATCTGTC |
| | | TTCATCTTCCCGCCATCTGATGAGCAGTTGAAA |
| | | TCTGGAACTGCCTCTGTTGTGTGCCTGCTGAAT |
| | | AACTTCTATCCCAGAGAGGCCAAAGTACAGTGG |
| | | AAGGTGGATAACGCCCTCCAATCGGGTAACTCC |
| | | CAGGAGAGTGTCACAGAGCAGGACAGCAAGGAC |
| | | AGCACCTACAGCCTCAGCAGCACCCTGACGCTG |
| | | AGCAAAGCAGACTACGAGAAACACAAAGTCTAC |
| | | GCCTGCGAAGTCACCCATCAGGGCCTGAGCTCG |
| | | CCCGTCACAAAGAGCTTCAACAGGGGAGAGTGT |

BAP049-hum12 HC

| | | |
|---|---|---|
| SEQ ID NO: 137 (Kabat) | HCDR1 | TYWMH |
| SEQ ID NO: 138 (Kabat) | HCDR2 | NIYPGTGGSNFDEKFKN |
| SEQ ID NO: 139 (Kabat) | HCDR3 | WTTGTGAY |
| SEQ ID NO: 140 (Chothia) | HCDR1 | GYTFTTY |
| SEQ ID NO: 141 (Chothia) | HCDR2 | YPGTGG |
| SEQ ID NO: 139 (Chothia) | HCDR3 | WTTGTGAY |
| SEQ ID NO: 172 | VH | EVQLVQSGAEVKKPGESLRISCKGSGYTFTTYW |
| | | MHWVRQATGQGLEWMGNIYPGTGGSNFDEKFKN |
| | | RVTITADKSTSTAYMELSSLRSEDTAVYYCTRW |
| | | TTGTGAYWGQGTTVTVSS |
| SEQ ID NO: 173 | DNA VH | GAAGTGCAGCTGGTGCAGTCTGGAGCAGAGGTG |
| | | AAAAAGCCCGGGGAGTCTCTGAGGATCTCCTGT |
| | | AAGGGTTCTGGCTACACATTCACCACTTACTGG |
| | | ATGCACTGGGTGCGACAGGCCACTGGACAAGGG |
| | | CTTGAGTGGATGGGTAATATTTATCCTGGTACT |
| | | GGTGGTTCTAACTTCGATGAGAAGTTCAAGAAC |
| | | AGAGTCACGATTACCGCGGACAAATCCACGAGC |
| | | ACAGCCTACATGGAGCTGAGCAGCCTGAGATCT |
| | | GAGGACACGGCCGTGTATTACTGTACAAGATGG |
| | | ACTACTGGGACGGGAGCTTATTGGGGCCAGGGC |
| | | ACCACCGTGACCGTGTCCTCC |
| SEQ ID NO: 174 | HC | EVQLVQSGAEVKKPGESLRISCKGSGYTFTTYW |
| | | MHWVRQATGQGLEWMGNIYPGTGGSNFDEKFKN |
| | | RVTITADKSTSTAYMELSSLRSEDTAVYYCTRW |
| | | TTGTGAYWGQGTTVTVSSASTKGPSVFPLAPCS |
| | | RSTSESTAALGCLVKDYFPEPVTVSWNSGALTS |
| | | GVHTFPAVLQSSGLYSLSSVVTVPSSSLGTKTY |
| | | TCNVDHKPSNTKVDKRVESKYGPPCPPCPAPEF |
| | | LGGPSVFLFPPKPKDTLMISRTPEVTCVVVDVS |
| | | QEDPEVQFNWYVDGVEVHNAKTKPREEQFNSTY |
| | | RVVSVLTVLHQDWLNGKEYKCKVSNKGLPSSIE |
| | | KTISKAKGQPREPQVYTLPPSQEEMTKNQVSLT |
| | | CLVKGFYPSDIAVEWESNGQPENNYKTTPPVLD |
| | | SDGSFFLYSRLTVDKSRWQEGNVFSCSVMHEAL |
| | | HNHYTQKSLSLSLGK |
| SEQ ID NO: 175 | DNA HC | GAAGTGCAGCTGGTGCAGTCTGGAGCAGAGGTG |
| | | AAAAAGCCCGGGGAGTCTCTGAGGATCTCCTGT |
| | | AAGGGTTCTGGCTACACATTCACCACTTACTGG |
| | | ATGCACTGGGTGCGACAGGCCACTGGACAAGGG |
| | | CTTGAGTGGATGGGTAATATTTATCCTGGTACT |
| | | GGTGGTTCTAACTTCGATGAGAAGTTCAAGAAC |
| | | AGAGTCACGATTACCGCGGACAAATCCACGAGC |
| | | ACAGCCTACATGGAGCTGAGCAGCCTGAGATCT |
| | | GAGGACACGGCCGTGTATTACTGTACAAGATGG |
| | | ACTACTGGGACGGGAGCTTATTGGGGCCAGGGC |
| | | ACCACCGTGACCGTGTCCTCCGCTTCCACCAAG |
| | | GGCCCATCCGTCTTCCCCCTGGCGCCCTGCTCC |
| | | AGGAGCACCTCCGAGAGCACAGCCGCCCTGGGC |
| | | TGCCTGGTCAAGGACTACTTCCCCGAACCGGTG |
| | | ACGGTGTCGTGGAACTCAGGCGCCCTGACCAGC |
| | | GGCGTGCACACCTTCCCGGCTGTCCTACAGTCC |
| | | TCAGGACTCTACTCCCTCAGCAGCGTGGTGACC |
| | | GTGCCCTCCAGCAGCTTGGGCACGAAGACCTAC |
| | | ACCTGCAACGTAGATCACAAGCCCAGCAACACC |
| | | AAGGTGGACAAGAGAGTTGAGTCCAAATATGGT |
| | | CCCCCATGCCCACCGTGCCCAGCACCTGAGTTC |
| | | CTGGGGGGACCATCAGTCTTCCTGTTCCCCCCA |
| | | AAACCCAAGGACACTCTCATGATCTCCCGGACC |
| | | CCTGAGGTCACGTGCGTGGTGGTGGACGTGAGC |
| | | CAGGAAGACCCCGAGGTCCAGTTCAACTGGTAC |
| | | GTGGATGGCGTGGAGGTGCATAATGCCAAGACA |
| | | AAGCCGCGGGAGGAGCAGTTCAACAGCACGTAC |
| | | CGTGTGGTCAGCGTCCTCACCGTCCTGCACCAG |
| | | GACTGGCTGAACGGCAAGGAGTACAAGTGCAAG |
| | | GTGTCCAACAAAGGCCTCCCGTCCTCCATCGAG |
| | | AAAACCATCTCCAAAGCCAAAGGGCAGCCCCGA |
| | | GAGCCACAGGTGTACACCCTGCCCCCATCCCAG |
| | | GAGGAGATGACCAAGAACCAGGTCAGCCTGACC |
| | | TGCCTGGTCAAAGGCTTCTACCCCAGCGACATC |
| | | GCCGTGGAGTGGGAGAGCAATGGGCAGCCGGAG |
| | | AACAACTACAAGACCACGCCTCCCGTGCTGGAC |
| | | TCCGACGGCTCCTTCTTCCTCTACAGCAGGCTA |
| | | ACCGTGGACAAGAGCAGGTGGCAGGAGGGGAAT |
| | | GTCTTCTCATGCTCCGTGATGCATGAGGCTCTG |
| | | CACAACCACTACACACAGAAGAGCCTCTCCCTG |
| | | TCTCTGGGTAAA |

BAP049-hum12 LC

| | | |
|---|---|---|
| SEQ ID NO: 146 (Kabat) | LCDR1 | KSSQSLLDSGNQKNFLT |
| SEQ ID NO: 147 (Kabat) | LCDR2 | WASTRES |
| SEQ ID NO: 166 (Kabat) | LCDR3 | QNDYSYPYT |
| SEQ ID NO: 149 (Chothia) | LCDR1 | SQSLLDSGNQKNF |
| SEQ ID NO: 150 (Chothia) | LCDR2 | WAS |
| SEQ ID NO: 167 (Chothia) | LCDR3 | DYSYPY |
| SEQ ID NO: 208 | VL | DIQMTQSPSSLSASVGDRVTITCKSSQSLLDSG |
| | | NQKNFLTWYLQKPGQSPQLLIYWASTRESGVPS |
| | | RFSGSGSGTDFTFTISSLEAEDAATYYCQNDYS |
| | | YPYTFGQGTKVEIK |
| SEQ ID NO: 209 | DNA VL | GACATCCAGATGACCCAGTCTCCATCCTCCCTG |
| | | TCTGCATCTGTAGGAGACAGAGTCACCATCACT |
| | | TGCAAGTCCAGTCAGAGTCTGTTAGACAGTGGA |
| | | AATCAAAAGAACTTCTTGACCTGGTACCTGCAG |
| | | AAGCCAGGGCAGTCTCCACAGCTCCTGATCTAT |
| | | TGGGCATCCACTAGGGAATCTGGGGTCCCCTCG |
| | | AGGTTCAGTGGCAGTGGATCTGGGACAGATTTC |
| | | ACCTTTACCATCAGTAGCCTGGAAGCTGAAGAT |
| | | GCTGCAACATATTACTGTCAGAATGATTATAGT |
| | | TATCCGTACACGTTCGGCCAAGGGACCAAGGTG |
| | | GAAATCAAA |
| SEQ ID NO: 210 | LC | DIQMTQSPSSLSASVGDRVTITCKSSQSLLDSG |
| | | NQKNFLTWYLQKPGQSPQLLIYWASTRESGVPS |
| | | RFSGSGSGTDFTFTISSLEAEDAATYYCQNDYS |
| | | YPYTFGQGTKVEIKRTVAAPSVFIFPPSDEQLK |
| | | SGTASVVCLLNNFYPREAKVQWKVDNALQSGNS |
| | | QESVTEQDSKDSTYSLSSTLTLSKADYEKHKVY |
| | | ACEVTHQGLSSPVTKSFNRGEC |
| SEQ ID NO: 211 | DNA LC | GACATCCAGATGACCCAGTCTCCATCCTCCCTG |
| | | TCTGCATCTGTAGGAGACAGAGTCACCATCACT |
| | | TGCAAGTCCAGTCAGAGTCTGTTAGACAGTGGA |
| | | AATCAAAAGAACTTCTTGACCTGGTACCTGCAG |
| | | AAGCCAGGGCAGTCTCCACAGCTCCTGATCTAT |
| | | TGGGCATCCACTAGGGAATCTGGGGTCCCCTCG |
| | | AGGTTCAGTGGCAGTGGATCTGGGACAGATTTC |
| | | ACCTTTACCATCAGTAGCCTGGAAGCTGAAGAT |
| | | GCTGCAACATATTACTGTCAGAATGATTATAGT |
| | | TATCCGTACACGTTCGGCCAAGGGACCAAGGTG |
| | | GAAATCAAACGTACGGTGGCTGCACCATCTGTC |
| | | TTCATCTTCCCGCCATCTGATGAGCAGTTGAAA |
| | | TCTGGAACTGCCTCTGTTGTGTGCCTGCTGAAT |
| | | AACTTCTATCCCAGAGAGGCCAAAGTACAGTGG |
| | | AAGGTGGATAACGCCCTCCAATCGGGTAACTCC |
| | | CAGGAGAGTGTCACAGAGCAGGACAGCAAGGAC |
| | | AGCACCTACAGCCTCAGCAGCACCCTGACGCTG |
| | | AGCAAAGCAGACTACGAGAAACACAAAGTCTAC |
| | | GCCTGCGAAGTCACCCATCAGGGCCTGAGCTCG |
| | | CCCGTCACAAAGAGCTTCAACAGGGGAGAGTGT |

BAP049-hum13 HC

| | | |
|---|---|---|
| SEQ ID NO: 137 (Kabat) | HCDR1 | TYWMH |
| SEQ ID NO: 138 (Kabat) | HCDR2 | NIYPGTGGSNFDEKFKN |
| SEQ ID NO: 139 (Kabat) | HCDR3 | WTTGTGAY |
| SEQ ID NO: 140 (Chothia) | HCDR1 | GYTFTTY |
| SEQ ID NO: 141 (Chothia) | HCDR2 | YPGTGG |
| SEQ ID NO: 139 (Chothia) | HCDR3 | WTTGTGAY |
| SEQ ID NO: 172 | VH | EVQLVQSGAEVKKPGESLRISCKGSGYTFTTYW |
| | | MHWVRQATGQGLEWMGNIYPGTGGSNFDEKFKN |
| | | RVTITADKSTSTAYMELSSLRSEDTAVYYCTRW |
| | | TTGTGAYWGQGTTVTVSS |
| SEQ ID NO: 173 | DNA VH | GAAGTGCAGCTGGTGCAGTCTGGAGCAGAGGTG |
| | | AAAAAGCCCGGGGAGTCTCTGAGGATCTCCTGT |
| | | AAGGGTTCTGGCTACACATTCACCACTTACTGG |
| | | ATGCACTGGGTGCGACAGGCCACTGGACAAGGG |
| | | CTTGAGTGGATGGGTAATATTTATCCTGGTACT |
| | | GGTGGTTCTAACTTCGATGAGAAGTTCAAGAAC |
| | | AGAGTCACGATTACCGCGGACAAATCCACGAGC |
| | | ACAGCCTACATGGAGCTGAGCAGCCTGAGATCT |
| | | GAGGACACGGCCGTGTATTACTGTACAAGATGG |
| | | ACTACTGGGACGGGAGCTTATTGGGGCCAGGGC |
| | | ACCACCGTGACCGTGTCCTCC |
| SEQ ID NO: 174 | HC | EVQLVQSGAEVKKPGESLRISCKGSGYTFTTYW |
| | | MHWVRQATGQGLEWMGNIYPGTGGSNFDEKFKN |
| | | RVTITADKSTSTAYMELSSLRSEDTAVYYCTRW |
| | | TTGTGAYWGQGTTVTVSSASTKGPSVFPLAPCS |
| | | RSTSESTAALGCLVKDYFPEPVTVSWNSGALTS |
| | | GVHTFPAVLQSSGLYSLSSVVTVPSSSLGTKTY |
| | | TCNVDHKPSNTKVDKRVESKYGPPCPPCPAPEF |
| | | LGGPSVFLFPPKPKDTLMISRTPEVTCVVVDVS |
| | | QEDPEVQFNWYVDGVEVHNAKTKPREEQFNSTY |
| | | RVVSVLTVLHQDWLNGKEYKCKVSNKGLPSSIE |
| | | KTISKAKGQPREPQVYTLPPSQEEMTKNQVSLT |
| | | CLVKGFYPSDIAVEWESNGQPENNYKTTPPVLD |
| | | SDGSFFLYSRLTVDKSRWQEGNVFSCSVMHEAL |
| | | HNHYTQKSLSLSLGK |
| SEQ ID NO: 175 | DNA HC | GAAGTGCAGCTGGTGCAGTCTGGAGCAGAGGTG |
| | | AAAAAGCCCGGGGAGTCTCTGAGGATCTCCTGT |
| | | AAGGGTTCTGGCTACACATTCACCACTTACTGG |
| | | ATGCACTGGGTGCGACAGGCCACTGGACAAGGG |
| | | CTTGAGTGGATGGGTAATATTTATCCTGGTACT |
| | | GGTGGTTCTAACTTCGATGAGAAGTTCAAGAAC |
| | | AGAGTCACGATTACCGCGGACAAATCCACGAGC |
| | | ACAGCCTACATGGAGCTGAGCAGCCTGAGATCT |
| | | GAGGACACGGCCGTGTATTACTGTACAAGATGG |
| | | ACTACTGGGACGGGAGCTTATTGGGGCCAGGGC |
| | | ACCACCGTGACCGTGTCCTCCGCTTCCACCAAG |
| | | GGCCCATCCGTCTTCCCCCTGGCGCCCTGCTCC |
| | | AGGAGCACCTCCGAGAGCACAGCCGCCCTGGGC |
| | | TGCCTGGTCAAGGACTACTTCCCCGAACCGGTG |
| | | ACGGTGTCGTGGAACTCAGGCGCCCTGACCAGC |
| | | GGCGTGCACACCTTCCCGGCTGTCCTACAGTCC |
| | | TCAGGACTCTACTCCCTCAGCAGCGTGGTGACC |
| | | GTGCCCTCCAGCAGCTTGGGCACGAAGACCTAC |
| | | ACCTGCAACGTAGATCACAAGCCCAGCAACACC |
| | | AAGGTGGACAAGAGAGTTGAGTCCAAATATGGT |
| | | CCCCCATGCCCACCGTGCCCAGCACCTGAGTTC |
| | | CTGGGGGGACCATCAGTCTTCCTGTTCCCCCCA |
| | | AAACCCAAGGACACTCTCATGATCTCCCGGACC |
| | | CCTGAGGTCACGTGCGTGGTGGTGGACGTGAGC |
| | | CAGGAAGACCCCGAGGTCCAGTTCAACTGGTAC |
| | | GTGGATGGCGTGGAGGTGCATAATGCCAAGACA |
| | | AAGCCGCGGGAGGAGCAGTTCAACAGCACGTAC |
| | | CGTGTGGTCAGCGTCCTCACCGTCCTGCACCAG |
| | | GACTGGCTGAACGGCAAGGAGTACAAGTGCAAG |
| | | GTGTCCAACAAAGGCCTCCCGTCCTCCATCGAG |
| | | AAAACCATCTCCAAAGCCAAAGGGCAGCCCCGA |
| | | GAGCCACAGGTGTACACCCTGCCCCCATCCCAG |
| | | GAGGAGATGACCAAGAACCAGGTCAGCCTGACC |
| | | TGCCTGGTCAAAGGCTTCTACCCCAGCGACATC |
| | | GCCGTGGAGTGGGAGAGCAATGGGCAGCCGGAG |
| | | AACAACTACAAGACCACGCCTCCCGTGCTGGAC |
| | | TCCGACGGCTCCTTCTTCCTCTACAGCAGGCTA |
| | | ACCGTGGACAAGAGCAGGTGGCAGGAGGGGAAT |
| | | GTCTTCTCATGCTCCGTGATGCATGAGGCTCTG |
| | | CACAACCACTACACACAGAAGAGCCTCTCCCTG |
| | | TCTCTGGGTAAA |

BAP049-hum13 LC

| | | |
|---|---|---|
| SEQ ID NO: 146 (Kabat) | LCDR1 | KSSQSLLDSGNQKNFLT |
| SEQ ID NO: 147 (Kabat) | LCDR2 | WASTRES |
| SEQ ID NO: 166 (Kabat) | LCDR3 | QNDYSYPYT |
| SEQ ID NO: 149 (Chothia) | LCDR1 | SQSLLDSGNQKNF |
| SEQ ID NO: 150 (Chothia) | LCDR2 | WAS |
| SEQ ID NO: 167 (Chothia) | LCDR3 | DYSYPY |
| SEQ ID NO: 212 | VL | DVVMTQSPLSLPVTLGQPASISCKSSQSLLDSG |
| | | NQKNFLTWYQQKPGKAPKLLIYWASTRESGVPS |
| | | RFSGSGSGTDFTFTISSLEAEDAATYYCQNDYS |
| | | YPYTFGQGTKVEIK |
| SEQ ID NO: 213 | DNA VL | GATGTTGTGATGACTCAGTCTCCACTCTCCCTG |
| | | CCCGTCACCCTTGGACAGCCGGCCTCCATCTCC |
| | | TGCAAGTCCAGTCAGAGTCTGTTAGACAGTGGA |
| | | AATCAAAAGAACTTCTTAACCTGGTATCAGCAG |
| | | AAACCAGGGAAAGCTCCTAAGCTCCTGATCTAT |
| | | TGGGCATCCACTAGGGAATCTGGGGTCCCCTCG |
| | | AGGTTCAGTGGCAGTGGATCTGGGACAGATTTC |
| | | ACCTTTACCATCAGTAGCCTGGAAGCTGAAGAT |
| | | GCTGCAACATATTACTGTCAGAATGATTATAGT |
| | | TATCCGTACACGTTCGGCCAAGGGACCAAGGTG |
| | | GAAATCAAA |
| SEQ ID NO: 214 | LC | DVVMTQSPLSLPVTLGQPASISCKSSQSLLDSG |
| | | NQKNFLTWYQQKPGKAPKLLIYWASTRESGVPS |
| | | RFSGSGSGTDFTFTISSLEAEDAATYYCQNDYS |
| | | YPYTFGQGTKVEIKRTVAAPSVFIFPPSDEQLK |
| | | SGTASVVCLLNNFYPREAKVQWKVDNALQSGNS |
| | | QESVTEQDSKDSTYSLSSTLTLSKADYEKHKVY |
| | | ACEVTHQGLSSPVTKSFNRGEC |
| SEQ ID NO: 215 | DNA LC | GATGTTGTGATGACTCAGTCTCCACTCTCCCTG |
| | | CCCGTCACCCTTGGACAGCCGGCCTCCATCTCC |
| | | TGCAAGTCCAGTCAGAGTCTGTTAGACAGTGGA |
| | | AATCAAAAGAACTTCTTAACCTGGTATCAGCAG |
| | | AAACCAGGGAAAGCTCCTAAGCTCCTGATCTAT |
| | | TGGGCATCCACTAGGGAATCTGGGGTCCCCTCG |
| | | AGGTTCAGTGGCAGTGGATCTGGGACAGATTTC |
| | | ACCTTTACCATCAGTAGCCTGGAAGCTGAAGAT |
| | | GCTGCAACATATTACTGTCAGAATGATTATAGT |
| | | TATCCGTACACGTTCGGCCAAGGGACCAAGGTG |
| | | GAAATCAAACGTACGGTGGCTGCACCATCTGTC |
| | | TTCATCTTCCCGCCATCTGATGAGCAGTTGAAA |
| | | TCTGGAACTGCCTCTGTTGTGTGCCTGCTGAAT |
| | | AACTTCTATCCCAGAGAGGCCAAAGTACAGTGG |
| | | AAGGTGGATAACGCCCTCCAATCGGGTAACTCC |
| | | CAGGAGAGTGTCACAGAGCAGGACAGCAAGGAC |
| | | AGCACCTACAGCCTCAGCAGCACCCTGACGCTG |
| | | AGCAAAGCAGACTACGAGAAACACAAAGTCTAC |
| | | GCCTGCGAAGTCACCCATCAGGGCCTGAGCTCG |
| | | CCCGTCACAAAGAGCTTCAACAGGGGAGAGTGT |

BAP049-hum14 HC

| | | |
|---|---|---|
| SEQ ID NO: 137 (Kabat) | HCDR1 | TYWMH |
| SEQ ID NO: 138 (Kabat) | HCDR2 | NIYPGTGGSNFDEKFKN |
| SEQ ID NO: 139 (Kabat) | HCDR3 | WTTGTGAY |
| SEQ ID NO: 140 (Chothia) | HCDR1 | GYTFTTY |
| SEQ ID NO: 141 (Chothia) | HCDR2 | YPGTGG |
| SEQ ID NO: 139 (Chothia) | HCDR3 | WTTGTGAY |
| SEQ ID NO: 216 | VH | QVQLVQSGAEVKKPGASVKVSCKASGYTFTTYW |
| | | MHWIRQSPSRGLEWLGNIYPGTGGSNFDEKFKN |
| | | RFTISRDNSKNTLYLQMNSLRAEDTAVYYCTRW |
| | | TTGTGAYWGQGTTVTVSS |
| SEQ ID NO: 217 | DNA VH | CAGGTTCAGCTGGTGCAGTCTGGAGCTGAGGTG |
| | | AAGAAGCCTGGGGCCTCAGTGAAGGTCTCCTGC |
| | | AAGGCTTCTGGCTACACATTCACCACTTACTGG |
| | | ATGCACTGGATCAGGCAGTCCCCATCGAGAGGC |
| | | CTTGAGTGGCTGGGTAATATTTATCCTGGTACT |
| | | GGTGGTTCTAACTTCGATGAGAAGTTCAAGAAC |
| | | AGATTCACCATCTCCAGAGACAATTCCAAGAAC |
| | | ACGCTGTATCTTCAAATGAACAGCCTGAGAGCC |
| | | GAGGACACGGCCGTGTATTACTGTACAAGATGG |
| | | ACTACTGGGACGGGAGCTTACTGGGGCCAGGGC |
| | | ACCACCGTGACCGTGTCCTCC |
| SEQ ID NO: 218 | HC | QVQLVQSGAEVKKPGASVKVSCKASGYTFTTYW |
| | | MHWIRQSPSRGLEWLGNIYPGTGGSNFDEKFKN |
| | | RFTISRDNSKNTLYLQMNSLRAEDTAVYYCTRW |
| | | TTGTGAYWGQGTTVTVSSASTKGPSVFPLAPCS |
| | | RSTSESTAALGCLVKDYFPEPVTVSWNSGALTS |
| | | GVHTFPAVLQSSGLYSLSSVVTVPSSSLGTKTY |
| | | TCNVDHKPSNTKVDKRVESKYGPPCPPCPAPEF |
| | | LGGPSVFLFPPKPKDTLMISRTPEVTCVVVDVS |
| | | QEDPEVQFNWYVDGVEVHNAKTKPREEQFNSTY |
| | | RVVSVLTVLHQDWLNGKEYKCKVSNKGLPSSIE |
| | | KTISKAKGQPREPQVYTLPPSQEEMTKNQVSLT |
| | | CLVKGFYPSDIAVEWESNGQPENNYKTTPPVLD |
| | | SDGSFFLYSRLTVDKSRWQEGNVFSCSVMHEAL |
| | | HNHYTQKSLSLSLGK |
| SEQ ID NO: 219 | DNA HC | CAGGTTCAGCTGGTGCAGTCTGGAGCTGAGGTG |
| | | AAGAAGCCTGGGGCCTCAGTGAAGGTCTCCTGC |
| | | AAGGCTTCTGGCTACACATTCACCACTTACTGG |
| | | ATGCACTGGATCAGGCAGTCCCCATCGAGAGGC |
| | | CTTGAGTGGCTGGGTAATATTTATCCTGGTACT |
| | | GGTGGTTCTAACTTCGATGAGAAGTTCAAGAAC |
| | | AGATTCACCATCTCCAGAGACAATTCCAAGAAC |
| | | ACGCTGTATCTTCAAATGAACAGCCTGAGAGCC |
| | | GAGGACACGGCCGTGTATTACTGTACAAGATGG |
| | | ACTACTGGGACGGGAGCTTACTGGGGCCAGGGC |
| | | ACCACCGTGACCGTGTCCTCCGCTTCCACCAAG |
| | | GGCCCATCCGTCTTCCCCCTGGCGCCCTGCTCC |
| | | AGGAGCACCTCCGAGAGCACAGCCGCCCTGGGC |
| | | TGCCTGGTCAAGGACTACTTCCCCGAACCGGTG |
| | | ACGGTGTCGTGGAACTCAGGCGCCCTGACCAGC |
| | | GGCGTGCACACCTTCCCGGCTGTCCTACAGTCC |
| | | TCAGGACTCTACTCCCTCAGCAGCGTGGTGACC |
| | | GTGCCCTCCAGCAGCTTGGGCACGAAGACCTAC |
| | | ACCTGCAACGTAGATCACAAGCCCAGCAACACC |
| | | AAGGTGGACAAGAGAGTTGAGTCCAAATATGGT |
| | | CCCCCATGCCCACCGTGCCCAGCACCTGAGTTC |
| | | CTGGGGGGACCATCAGTCTTCCTGTTCCCCCCA |
| | | AAACCCAAGGACACTCTCATGATCTCCCGGACC |
| | | CCTGAGGTCACGTGCGTGGTGGTGGACGTGAGC |
| | | CAGGAAGACCCCGAGGTCCAGTTCAACTGGTAC |
| | | GTGGATGGCGTGGAGGTGCATAATGCCAAGACA |
| | | AAGCCGCGGGAGGAGCAGTTCAACAGCACGTAC |
| | | CGTGTGGTCAGCGTCCTCACCGTCCTGCACCAG |
| | | GACTGGCTGAACGGCAAGGAGTACAAGTGCAAG |
| | | GTGTCCAACAAAGGCCTCCCGTCCTCCATCGAG |
| | | AAAACCATCTCCAAAGCCAAAGGGCAGCCCCGA |
| | | GAGCCACAGGTGTACACCCTGCCCCCATCCCAG |
| | | GAGGAGATGACCAAGAACCAGGTCAGCCTGACC |
| | | TGCCTGGTCAAAGGCTTCTACCCCAGCGACATC |
| | | GCCGTGGAGTGGGAGAGCAATGGGCAGCCGGAG |
| | | AACAACTACAAGACCACGCCTCCCGTGCTGGAC |
| | | TCCGACGGCTCCTTCTTCCTCTACAGCAGGCTA |
| | | ACCGTGGACAAGAGCAGGTGGCAGGAGGGGAAT |
| | | GTCTTCTCATGCTCCGTGATGCATGAGGCTCTG |
| | | CACAACCACTACACACAGAAGAGCCTCTCCCTG |
| | | TCTCTGGGTAAA |

BAP049-hum14 LC

| | | |
|---|---|---|
| SEQ ID NO: 146 (Kabat) | LCDR1 | KSSQSLLDSGNQKNFLT |
| SEQ ID NO: 147 (Kabat) | LCDR2 | WASTRES |
| SEQ ID NO: 166 (Kabat) | LCDR3 | QNDYSYPYT |
| SEQ ID NO: 149 (Chothia) | LCDR1 | SQSLLDSGNQKNF |
| SEQ ID NO: 150 (Chothia) | LCDR2 | WAS |
| SEQ ID NO: 167 (Chothia) | LCDR3 | DYSYPY |
| SEQ ID NO: 204 | VL | EIVLTQSPATLSLSPGERATLSCKSSQSLLDSG |
| | | NQKNFLTWYQQKPGQAPRLLIYWASTRESGVPS |
| | | RFSGSGSGTDFTFTISSLEAEDAATYYCQNDYS |
| | | YPYTFGQGTKVEIK |
| SEQ ID NO: 205 | DNA VL | GAAATTGTGTTGACACAGTCTCCAGCCACCCTG |
| | | TCTTTGTCTCCAGGGGAAAGAGCCACCCTCTCC |
| | | TGCAAGTCCAGTCAGAGTCTGTTAGACAGTGGA |
| | | AATCAAAAGAACTTCTTGACCTGGTACCAGCAG |
| | | AAACCTGGCCAGGCTCCCAGGCTCCTCATCTAT |
| | | TGGGCATCCACTAGGGAATCTGGGGTCCCCTCG |
| | | AGGTTCAGTGGCAGTGGATCTGGGACAGATTTC |
| | | ACCTTTACCATCAGTAGCCTGGAAGCTGAAGAT |
| | | GCTGCAACATATTACTGTCAGAATGATTATAGT |
| | | TATCCGTACACGTTCGGCCAAGGGACCAAGGTG |
| | | GAAATCAAA |
| SEQ ID NO: 206 | LC | EIVLTQSPATLSLSPGERATLSCKSSQSLLDSG |
| | | NQKNFLTWYQQKPGQAPRLLIYWASTRESGVPS |
| | | RFSGSGSGTDFTFTISSLEAEDAATYYCQNDYS |
| | | YPYTFGQGTKVEIKRTVAAPSVFIFPPSDEQLK |
| | | SGTASVVCLLNNFYPREAKVQWKVDNALQSGNS |
| | | QESVTEQDSKDSTYSLSSTLTLSKADYEKHKVY |
| | | ACEVTHQGLSSPVTKSFNRGEC |
| SEQ ID NO: 207 | DNA LC | GAAATTGTGTTGACACAGTCTCCAGCCACCCTG |
| | | TCTTTGTCTCCAGGGGAAAGAGCCACCCTCTCC |
| | | TGCAAGTCCAGTCAGAGTCTGTTAGACAGTGGA |
| | | AATCAAAAGAACTTCTTGACCTGGTACCAGCAG |
| | | AAACCTGGCCAGGCTCCCAGGCTCCTCATCTAT |
| | | TGGGCATCCACTAGGGAATCTGGGGTCCCCTCG |
| | | AGGTTCAGTGGCAGTGGATCTGGGACAGATTTC |
| | | ACCTTTACCATCAGTAGCCTGGAAGCTGAAGAT |
| | | GCTGCAACATATTACTGTCAGAATGATTATAGT |
| | | TATCCGTACACGTTCGGCCAAGGGACCAAGGTG |
| | | GAAATCAAACGTACGGTGGCTGCACCATCTGTC |
| | | TTCATCTTCCCGCCATCTGATGAGCAGTTGAAA |
| | | TCTGGAACTGCCTCTGTTGTGTGCCTGCTGAAT |
| | | AACTTCTATCCCAGAGAGGCCAAAGTACAGTGG |
| | | AAGGTGGATAACGCCCTCCAATCGGGTAACTCC |
| | | CAGGAGAGTGTCACAGAGCAGGACAGCAAGGAC |
| | | AGCACCTACAGCCTCAGCAGCACCCTGACGCTG |
| | | AGCAAAGCAGACTACGAGAAACACAAAGTCTAC |
| | | GCCTGCGAAGTCACCCATCAGGGCCTGAGCTCG |
| | | CCCGTCACAAAGAGCTTCAACAGGGGAGAGTGT |

BAP049-hum15 HC

| | | |
|---|---|---|
| SEQ ID NO: 137 (Kabat) | HCDR1 | TYWMH |
| SEQ ID NO: 138 (Kabat) | HCDR2 | NIYPGTGGSNFDEKFKN |
| SEQ ID NO: 139 (Kabat) | HCDR3 | WTTGTGAY |
| SEQ ID NO: 140 (Chothia) | HCDR1 | GYTFTTY |
| SEQ ID NO: 141 (Chothia) | HCDR2 | YPGTGG |
| SEQ ID NO: 139 (Chothia) | HCDR3 | WTTGTGAY |
| SEQ ID NO: 216 | VH | QVQLVQSGAEVKKPGASVKVSCKASGYTFTTYW |
| | | MHWIRQSPSRGLEWLGNIYPGTGGSNFDEKFKN |
| | | RFTISRDNSKNTLYLQMNSLRAEDTAVYYCTRW |
| | | TTGTGAYWGQGTTVTVSS |
| SEQ ID NO: 217 | DNA VH | CAGGTTCAGCTGGTGCAGTCTGGAGCTGAGGTG |
| | | AAGAAGCCTGGGGCCTCAGTGAAGGTCTCCTGC |
| | | AAGGCTTCTGGCTACACATTCACCACTTACTGG |
| | | ATGCACTGGATCAGGCAGTCCCCATCGAGAGGC |
| | | CTTGAGTGGCTGGGTAATATTTATCCTGGTACT |
| | | GGTGGTTCTAACTTCGATGAGAAGTTCAAGAAC |
| | | AGATTCACCATCTCCAGAGACAATTCCAAGAAC |
| | | ACGCTGTATCTTCAAATGAACAGCCTGAGAGCC |
| | | GAGGACACGGCCGTGTATTACTGTACAAGATGG |
| | | ACTACTGGGACGGGAGCTTACTGGGGCCAGGGC |
| | | ACCACCGTGACCGTGTCCTCC |
| SEQ ID NO: 218 | HC | QVQLVQSGAEVKKPGASVKVSCKASGYTFTTYW |
| | | MHWIRQSPSRGLEWLGNIYPGTGGSNFDEKFKN |
| | | RFTISRDNSKNTLYLQMNSLRAEDTAVYYCTRW |
| | | TTGTGAYWGQGTTVTVSSASTKGPSVFPLAPCS |
| | | RSTSESTAALGCLVKDYFPEPVTVSWNSGALTS |
| | | GVHTFPAVLQSSGLYSLSSVVTVPSSSLGTKTY |
| | | TCNVDHKPSNTKVDKRVESKYGPPCPPCPAPEF |
| | | LGGPSVFLFPPKPKDTLMISRTPEVTCVVVDVS |
| | | QEDPEVQFNWYVDGVEVHNAKTKPREEQFNSTY |
| | | RVVSVLTVLHQDWLNGKEYKCKVSNKGLPSSIE |
| | | KTISKAKGQPREPQVYTLPPSQEEMTKNQVSLT |
| | | CLVKGFYPSDIAVEWESNGQPENNYKTTPPVLD |
| | | SDGSFFLYSRLTVDKSRWQEGNVFSCSVMHEAL |
| | | HNHYTQKSLSLSLGK |
| SEQ ID NO: 219 | DNA HC | CAGGTTCAGCTGGTGCAGTCTGGAGCTGAGGTG |
| | | AAGAAGCCTGGGGCCTCAGTGAAGGTCTCCTGC |
| | | AAGGCTTCTGGCTACACATTCACCACTTACTGG |
| | | ATGCACTGGATCAGGCAGTCCCCATCGAGAGGC |
| | | CTTGAGTGGCTGGGTAATATTTATCCTGGTACT |
| | | GGTGGTTCTAACTTCGATGAGAAGTTCAAGAAC |
| | | AGATTCACCATCTCCAGAGACAATTCCAAGAAC |
| | | ACGCTGTATCTTCAAATGAACAGCCTGAGAGCC |
| | | GAGGACACGGCCGTGTATTACTGTACAAGATGG |
| | | ACTACTGGGACGGGAGCTTACTGGGGCCAGGGC |
| | | ACCACCGTGACCGTGTCCTCCGCTTCCACCAAG |
| | | GGCCCATCCGTCTTCCCCCTGGCGCCCTGCTCC |
| | | AGGAGCACCTCCGAGAGCACAGCCGCCCTGGGC |
| | | TGCCTGGTCAAGGACTACTTCCCCGAACCGGTG |
| | | ACGGTGTCGTGGAACTCAGGCGCCCTGACCAGC |
| | | GGCGTGCACACCTTCCCGGCTGTCCTACAGTCC |
| | | TCAGGACTCTACTCCCTCAGCAGCGTGGTGACC |
| | | GTGCCCTCCAGCAGCTTGGGCACGAAGACCTAC |
| | | ACCTGCAACGTAGATCACAAGCCCAGCAACACC |
| | | AAGGTGGACAAGAGAGTTGAGTCCAAATATGGT |
| | | CCCCCATGCCCACCGTGCCCAGCACCTGAGTTC |
| | | CTGGGGGGACCATCAGTCTTCCTGTTCCCCCCA |
| | | AAACCCAAGGACACTCTCATGATCTCCCGGACC |
| | | CCTGAGGTCACGTGCGTGGTGGTGGACGTGAGC |
| | | CAGGAAGACCCCGAGGTCCAGTTCAACTGGTAC |
| | | GTGGATGGCGTGGAGGTGCATAATGCCAAGACA |
| | | AAGCCGCGGGAGGAGCAGTTCAACAGCACGTAC |
| | | CGTGTGGTCAGCGTCCTCACCGTCCTGCACCAG |
| | | GACTGGCTGAACGGCAAGGAGTACAAGTGCAAG |
| | | GTGTCCAACAAAGGCCTCCCGTCCTCCATCGAG |
| | | AAAACCATCTCCAAAGCCAAAGGGCAGCCCCGA |
| | | GAGCCACAGGTGTACACCCTGCCCCCATCCCAG |
| | | GAGGAGATGACCAAGAACCAGGTCAGCCTGACC |
| | | TGCCTGGTCAAAGGCTTCTACCCCAGCGACATC |
| | | GCCGTGGAGTGGGAGAGCAATGGGCAGCCGGAG |
| | | AACAACTACAAGACCACGCCTCCCGTGCTGGAC |
| | | TCCGACGGCTCCTTCTTCCTCTACAGCAGGCTA |
| | | ACCGTGGACAAGAGCAGGTGGCAGGAGGGGAAT |
| | | GTCTTCTCATGCTCCGTGATGCATGAGGCTCTG |
| | | CACAACCACTACACACAGAAGAGCCTCTCCCTG |
| | | TCTCTGGGTAAA |

BAP049-hum15 LC

| | | |
|---|---|---|
| SEQ ID NO: 146 (Kabat) | LCDR1 | KSSQSLLDSGNQKNFLT |
| SEQ ID NO: 147 (Kabat) | LCDR2 | WASTRES |
| SEQ ID NO: 166 (Kabat) | LCDR3 | QNDYSYPYT |
| SEQ ID NO: 149 (Chothia) | LCDR1 | SQSLLDSGNQKNF |
| SEQ ID NO: 150 (Chothia) | LCDR2 | WAS |
| SEQ ID NO: 167 (Chothia) | LCDR3 | DYSYPY |
| SEQ ID NO: 200 | VL | EIVLTQSPDFQSVTPKEKVTITCKSSQSLLDSG |
| | | NQKNFLTWYQQKPGQAPRLLIYWASTRESGVPS |
| | | RFSGSGSGTDFTFTISSLEAEDAATYYCQNDYS |
| | | YPYTFGQGTKVEIK |
| SEQ ID NO: 201 | DNA VL | GAAATTGTGCTGACTCAGTCTCCAGACTTTCAG |
| | | TCTGTGACTCCAAAGGAGAAAGTCACCATCACC |
| | | TGCAAGTCCAGTCAGAGTCTGTTAGACAGTGGA |
| | | AATCAAAAGAACTTCTTGACCTGGTACCAGCAG |
| | | AAACCTGGCCAGGCTCCCAGGCTCCTCATCTAT |
| | | TGGGCATCCACTAGGGAATCTGGGGTCCCCTCG |
| | | AGGTTCAGTGGCAGTGGATCTGGGACAGATTTC |
| | | ACCTTTACCATCAGTAGCCTGGAAGCTGAAGAT |
| | | GCTGCAACATATTACTGTCAGAATGATTATAGT |
| | | TATCCGTACACGTTCGGCCAAGGGACCAAGGTG |
| | | GAAATCAAA |
| SEQ ID NO: 202 | LC | EIVLTQSPDFQSVTPKEKVTITCKSSQSLLDSG |
| | | NQKNFLTWYQQKPGQAPRLLIYWASTRESGVPS |
| | | RFSGSGSGTDFTFTISSLEAEDAATYYCQNDYS |
| | | YPYTFGQGTKVEIKRTVAAPSVFIFPPSDEQLK |
| | | SGTASVVCLLNNFYPREAKVQWKVDNALQSGNS |
| | | QESVTEQDSKDSTYSLSSTLTLSKADYEKHKVY |
| | | ACEVTHQGLSSPVTKSFNRGEC |
| SEQ ID NO: 203 | DNA LC | GAAATTGTGCTGACTCAGTCTCCAGACTTTCAG |
| | | TCTGTGACTCCAAAGGAGAAAGTCACCATCACC |
| | | TGCAAGTCCAGTCAGAGTCTGTTAGACAGTGGA |
| | | AATCAAAAGAACTTCTTGACCTGGTACCAGCAG |
| | | AAACCTGGCCAGGCTCCCAGGCTCCTCATCTAT |
| | | TGGGCATCCACTAGGGAATCTGGGGTCCCCTCG |
| | | AGGTTCAGTGGCAGTGGATCTGGGACAGATTTC |
| | | ACCTTTACCATCAGTAGCCTGGAAGCTGAAGAT |
| | | GCTGCAACATATTACTGTCAGAATGATTATAGT |
| | | TATCCGTACACGTTCGGCCAAGGGACCAAGGTG |
| | | GAAATCAAACGTACGGTGGCTGCACCATCTGTC |
| | | TTCATCTTCCCGCCATCTGATGAGCAGTTGAAA |
| | | TCTGGAACTGCCTCTGTTGTGTGCCTGCTGAAT |
| | | AACTTCTATCCCAGAGAGGCCAAAGTACAGTGG |
| | | AAGGTGGATAACGCCCTCCAATCGGGTAACTCC |
| | | CAGGAGAGTGTCACAGAGCAGGACAGCAAGGAC |
| | | AGCACCTACAGCCTCAGCAGCACCCTGACGCTG |
| | | AGCAAAGCAGACTACGAGAAACACAAAGTCTAC |
| | | GCCTGCGAAGTCACCCATCAGGGCCTGAGCTCG |
| | | CCCGTCACAAAGAGCTTCAACAGGGGAGAGTGT |

BAP049-hum16 HC

| | | |
|---|---|---|
| SEQ ID NO: 137 (Kabat) | HCDR1 | TYWMH |
| SEQ ID NO: 138 (Kabat) | HCDR2 | NIYPGTGGSNFDEKFKN |
| SEQ ID NO: 139 (Kabat) | HCDR3 | WTTGTGAY |
| SEQ ID NO: 140 (Chothia) | HCDR1 | GYTFTTY |
| SEQ ID NO: 141 (Chothia) | HCDR2 | YPGTGG |
| SEQ ID NO: 139 (Chothia) | HCDR3 | WTTGTGAY |
| SEQ ID NO: 220 | VH | EVQLVQSGAEVKKPGESLRISCKGSGYTFTTYW |
| | | MHWVRQAPGQGLEWMGNIYPGTGGSNFDEKFKN |
| | | RFTISRDNSKNTLYLQMNSLRAEDTAVYYCTRW |
| | | TTGTGAYWGQGTTVTVSS |
| SEQ ID NO: 221 | DNA VH | GAAGTGCAGCTGGTGCAGTCTGGAGCAGAGGTG |
| | | AAAAAGCCCGGGGAGTCTCTGAGGATCTCCTGT |
| | | AAGGGTTCTGGCTACACATTCACCACTTACTGG |
| | | ATGCACTGGGTGCGACAGGCCCCTGGACAAGGG |
| | | CTTGAGTGGATGGGTAATATTTATCCTGGTACT |
| | | GGTGGTTCTAACTTCGATGAGAAGTTCAAGAAC |
| | | AGATTCACCATCTCCAGAGACAATTCCAAGAAC |
| | | ACGCTGTATCTTCAAATGAACAGCCTGAGAGCC |
| | | GAGGACACGGCCGTGTATTACTGTACAAGATGG |
| | | ACTACTGGGACGGGAGCTTATTGGGGCCAGGGC |
| | | ACCACCGTGACCGTGTCCTCC |
| SEQ ID NO: 222 | HC | EVQLVQSGAEVKKPGESLRISCKGSGYTFTTYW |
| | | MHWVRQAPGQGLEWMGNIYPGTGGSNFDEKFKN |
| | | RFTISRDNSKNTLYLQMNSLRAEDTAVYYCTRW |
| | | TTGTGAYWGQGTTVTVSSASTKGPSVFPLAPCS |
| | | RSTSESTAALGCLVKDYFPEPVTVSWNSGALTS |
| | | GVHTFPAVLQSSGLYSLSSVVTVPSSSLGTKTY |
| | | TCNVDHKPSNTKVDKRVESKYGPPCPPCPAPEF |
| | | LGGPSVFLFPPKPKDTLMISRTPEVTCVVVDVS |
| | | QEDPEVQFNWYVDGVEVHNAKTKPREEQFNSTY |
| | | RVVSVLTVLHQDWLNGKEYKCKVSNKGLPSSIE |
| | | KTISKAKGQPREPQVYTLPPSQEEMTKNQVSLT |
| | | CLVKGFYPSDIAVEWESNGQPENNYKTTPPVLD |
| | | SDGSFFLYSRLTVDKSRWQEGNVFSCSVMHEAL |
| | | HNHYTQKSLSLSLGK |
| SEQ ID NO: 223 | DNA HC | GAAGTGCAGCTGGTGCAGTCTGGAGCAGAGGTG |
| | | AAAAAGCCCGGGGAGTCTCTGAGGATCTCCTGT |
| | | AAGGGTTCTGGCTACACATTCACCACTTACTGG |
| | | ATGCACTGGGTGCGACAGGCCCCTGGACAAGGG |
| | | CTTGAGTGGATGGGTAATATTTATCCTGGTACT |
| | | GGTGGTTCTAACTTCGATGAGAAGTTCAAGAAC |
| | | AGATTCACCATCTCCAGAGACAATTCCAAGAAC |
| | | ACGCTGTATCTTCAAATGAACAGCCTGAGAGCC |
| | | GAGGACACGGCCGTGTATTACTGTACAAGATGG |
| | | ACTACTGGGACGGGAGCTTATTGGGGCCAGGGC |
| | | ACCACCGTGACCGTGTCCTCCGCTTCCACCAAG |
| | | GGCCCATCCGTCTTCCCCCTGGCGCCCTGCTCC |
| | | AGGAGCACCTCCGAGAGCACAGCCGCCCTGGGC |
| | | TGCCTGGTCAAGGACTACTTCCCCGAACCGGTG |
| | | ACGGTGTCGTGGAACTCAGGCGCCCTGACCAGC |
| | | GGCGTGCACACCTTCCCGGCTGTCCTACAGTCC |
| | | TCAGGACTCTACTCCCTCAGCAGCGTGGTGACC |
| | | GTGCCCTCCAGCAGCTTGGGCACGAAGACCTAC |
| | | ACCTGCAACGTAGATCACAAGCCCAGCAACACC |
| | | AAGGTGGACAAGAGAGTTGAGTCCAAATATGGT |
| | | CCCCCATGCCCACCGTGCCCAGCACCTGAGTTC |
| | | CTGGGGGGACCATCAGTCTTCCTGTTCCCCCCA |
| | | AAACCCAAGGACACTCTCATGATCTCCCGGACC |
| | | CCTGAGGTCACGTGCGTGGTGGTGGACGTGAGC |
| | | CAGGAAGACCCCGAGGTCCAGTTCAACTGGTAC |
| | | GTGGATGGCGTGGAGGTGCATAATGCCAAGACA |
| | | AAGCCGCGGGAGGAGCAGTTCAACAGCACGTAC |
| | | CGTGTGGTCAGCGTCCTCACCGTCCTGCACCAG |
| | | GACTGGCTGAACGGCAAGGAGTACAAGTGCAAG |
| | | GTGTCCAACAAAGGCCTCCCGTCCTCCATCGAG |
| | | AAAACCATCTCCAAAGCCAAAGGGCAGCCCCGA |
| | | GAGCCACAGGTGTACACCCTGCCCCCATCCCAG |
| | | GAGGAGATGACCAAGAACCAGGTCAGCCTGACC |
| | | TGCCTGGTCAAAGGCTTCTACCCCAGCGACATC |
| | | GCCGTGGAGTGGGAGAGCAATGGGCAGCCGGAG |
| | | AACAACTACAAGACCACGCCTCCCGTGCTGGAC |
| | | TCCGACGGCTCCTTCTTCCTCTACAGCAGGCTA |
| | | ACCGTGGACAAGAGCAGGTGGCAGGAGGGGAAT |
| | | GTCTTCTCATGCTCCGTGATGCATGAGGCTCTG |
| | | CACAACCACTACACACAGAAGAGCCTCTCCCTG |
| | | TCTCTGGGTAAA |

BAP049-hum16 LC

| | | |
|---|---|---|
| SEQ ID NO: 146 (Kabat) | LCDR1 | KSSQSLLDSGNQKNFLT |
| SEQ ID NO: 147 (Kabat) | LCDR2 | WASTRES |
| SEQ ID NO: 166 (Kabat) | LCDR3 | QNDYSYPYT |
| SEQ ID NO: 149 (Chothia) | LCDR1 | SQSLLDSGNQKNF |
| SEQ ID NO: 150 (Chothia) | LCDR2 | WAS |
| SEQ ID NO: 167 (Chothia) | LCDR3 | DYSYPY |
| SEQ ID NO: 200 | VL | EIVLTQSPDFQSVTPKEKVTITCKSSQSLLDSG |
| | | NQKNFLTWYQQKPGQAPRLLIYWASTRESGVPS |
| | | RFSGSGSGTDFTFTISSLEAEDAATYYCQNDYS |
| | | YPYTFGQGTKVEIK |
| SEQ ID NO: 201 | DNA VL | GAAATTGTGCTGACTCAGTCTCCAGACTTTCAG |
| | | TCTGTGACTCCAAAGGAGAAAGTCACCATCACC |
| | | TGCAAGTCCAGTCAGAGTCTGTTAGACAGTGGA |
| | | AATCAAAAGAACTTCTTGACCTGGTACCAGCAG |
| | | AAACCTGGCCAGGCTCCCAGGCTCCTCATCTAT |
| | | TGGGCATCCACTAGGGAATCTGGGGTCCCCTCG |
| | | AGGTTCAGTGGCAGTGGATCTGGGACAGATTTC |
| | | ACCTTTACCATCAGTAGCCTGGAAGCTGAAGAT |
| | | GCTGCAACATATTACTGTCAGAATGATTATAGT |
| | | TATCCGTACACGTTCGGCCAAGGGACCAAGGTG |
| | | GAAATCAAA |
| SEQ ID NO: 202 | LC | EIVLTQSPDFQSVTPKEKVTITCKSSQSLLDSG |
| | | NQKNFLTWYQQKPGQAPRLLIYWASTRESGVPS |
| | | RFSGSGSGTDFTFTISSLEAEDAATYYCQNDYS |
| | | YPYTFGQGTKVEIKRTVAAPSVFIFPPSDEQLK |
| | | SGTASVVCLLNNFYPREAKVQWKVDNALQSGNS |
| | | QESVTEQDSKDSTYSLSSTLTLSKADYEKHKVY |
| | | ACEVTHQGLSSPVTKSFNRGEC |
| SEQ ID NO: 203 | DNA LC | GAAATTGTGCTGACTCAGTCTCCAGACTTTCAG |
| | | TCTGTGACTCCAAAGGAGAAAGTCACCATCACC |
| | | TGCAAGTCCAGTCAGAGTCTGTTAGACAGTGGA |
| | | AATCAAAAGAACTTCTTGACCTGGTACCAGCAG |
| | | AAACCTGGCCAGGCTCCCAGGCTCCTCATCTAT |
| | | TGGGCATCCACTAGGGAATCTGGGGTCCCCTCG |
| | | AGGTTCAGTGGCAGTGGATCTGGGACAGATTTC |
| | | ACCTTTACCATCAGTAGCCTGGAAGCTGAAGAT |
| | | GCTGCAACATATTACTGTCAGAATGATTATAGT |
| | | TATCCGTACACGTTCGGCCAAGGGACCAAGGTG |
| | | GAAATCAAACGTACGGTGGCTGCACCATCTGTC |
| | | TTCATCTTCCCGCCATCTGATGAGCAGTTGAAA |
| | | TCTGGAACTGCCTCTGTTGTGTGCCTGCTGAAT |
| | | AACTTCTATCCCAGAGAGGCCAAAGTACAGTGG |
| | | AAGGTGGATAACGCCCTCCAATCGGGTAACTCC |
| | | CAGGAGAGTGTCACAGAGCAGGACAGCAAGGAC |
| | | AGCACCTACAGCCTCAGCAGCACCCTGACGCTG |
| | | AGCAAAGCAGACTACGAGAAACACAAAGTCTAC |
| | | GCCTGCGAAGTCACCCATCAGGGCCTGAGCTCG |
| | | CCCGTCACAAAGAGCTTCAACAGGGGAGAGTGT |

BAP049-Clone-A HC

| | | |
|---|---|---|
| SEQ ID NO: 137 (Kabat) | HCDR1 | TYWMH |
| SEQ ID NO: 138 (Kabat) | HCDR2 | NIYPGTGGSNFDEKFKN |
| SEQ ID NO: 139 (Kabat) | HCDR3 | WTTGTGAY |
| SEQ ID NO: 140 (Chothia) | HCDR1 | GYTFTTY |
| SEQ ID NO: 141 (Chothia) | HCDR2 | YPGTGG |
| SEQ ID NO: 139 (Chothia) | HCDR3 | WTTGTGAY |
| SEQ ID NO: 172 | VH | EVQLVQSGAEVKKPGESLRISCKGSGYTFTTYW |
| | | MHWVRQATGQGLEWMGNIYPGTGGSNFDEKFKN |
| | | RVTITADKSTSTAYMELSSLRSEDTAVYYCTRW |
| | | TTGTGAYWGQGTTVTVSS |
| SEQ ID NO: 224 | DNA VH | GAAGTGCAGCTGGTGCAGTCTGGCGCCGAAGTG |
| | | AAGAAGCCTGGCGAGTCCCTGCGGATCTCCTGC |
| | | AAGGGCTCTGGCTACACCTTCACCACCTACTGG |
| | | ATGCACTGGGTGCGACAGGCTACCGGCCAGGGC |
| | | CTGGAATGGATGGGCAACATCTATCCTGGCACC |
| | | GGCGGCTCCAACTTCGACGAGAAGTTCAAGAAC |
| | | AGAGTGACCATCACCGCCGACAAGTCCACCTCC |
| | | ACCGCCTACATGGAACTGTCCTCCCTGAGATCC |
| | | GAGGACACCGCCGTGTACTACTGCACCCGGTGG |
| | | ACAACCGGCACAGGCGCTTATTGGGGCCAGGGC |
| | | ACCACAGTGACCGTGTCCTCT |
| SEQ ID NO: 225 | HC | EVQLVQSGAEVKKPGESLRISCKGSGYTFTTYW |
| | | MHWVRQATGQGLEWMGNIYPGTGGSNFDEKFKN |
| | | RVTITADKSTSTAYMELSSLRSEDTAVYYCTRW |
| | | TTGTGAYWGQGTTVTVSSASTKGPSVFPLAPCS |
| | | RSTSESTAALGCLVKDYFPEPVTVSWNSGALTS |
| | | GVHTFPAVLQSSGLYSLSSVVTVPSSSLGTKTY |
| | | TCNVDHKPSNTKVDKRVESKYGPPCPPCPAPEF |
| | | LGGPSVFLFPPKPKDTLMISRTPEVTCVVVDVS |
| | | QEDPEVQFNWYVDGVEVHNAKTKPREEQFNSTY |
| | | RVVSVLTVLHQDWLNGKEYKCKVSNKGLPSSIE |
| | | KTISKAKGQPREPQVYTLPPSQEEMTKNQVSLT |
| | | CLVKGFYPSDIAVEWESNGQPENNYKTTPPVLD |
| | | SDGSFFLYSRLTVDKSRWQEGNVFSCSVMHEAL |
| | | HNHYTQKSLSLSLG |
| SEQ ID NO: 226 | DNA HC | GAAGTGCAGCTGGTGCAGTCTGGCGCCGAAGTG |
| | | AAGAAGCCTGGCGAGTCCCTGCGGATCTCCTGC |
| | | AAGGGCTCTGGCTACACCTTCACCACCTACTGG |
| | | ATGCACTGGGTGCGACAGGCTACCGGCCAGGGC |
| | | CTGGAATGGATGGGCAACATCTATCCTGGCACC |
| | | GGCGGCTCCAACTTCGACGAGAAGTTCAAGAAC |
| | | AGAGTGACCATCACCGCCGACAAGTCCACCTCC |
| | | ACCGCCTACATGGAACTGTCCTCCCTGAGATCC |
| | | GAGGACACCGCCGTGTACTACTGCACCCGGTGG |
| | | ACAACCGGCACAGGCGCTTATTGGGGCCAGGGC |
| | | ACCACAGTGACCGTGTCCTCTGCTTCTACCAAG |
| | | GGGCCCAGCGTGTTCCCCCTGGCCCCCTGCTCC |
| | | AGAAGCACCAGCGAGAGCACAGCCGCCCTGGGC |
| | | TGCCTGGTGAAGGACTACTTCCCCGAGCCCGTG |
| | | ACCGTGTCCTGGAACAGCGGAGCCCTGACCAGC |
| | | GGCGTGCACACCTTCCCCGCCGTGCTGCAGAGC |
| | | AGCGGCCTGTACAGCCTGAGCAGCGTGGTGACC |
| | | GTGCCCAGCAGCAGCCTGGGCACCAAGACCTAC |
| | | ACCTGTAACGTGGACCACAAGCCCAGCAACACC |
| | | AAGGTGGACAAGAGGGTGGAGAGCAAGTACGGC |
| | | CCACCCTGCCCCCCCTGCCCAGCCCCCGAGTTC |
| | | CTGGGCGGACCCAGCGTGTTCCTGTTCCCCCCC |
| | | AAGCCCAAGGACACCCTGATGATCAGCAGAACC |
| | | CCCGAGGTGACCTGTGTGGTGGTGGACGTGTCC |
| | | CAGGAGGACCCCGAGGTCCAGTTCAACTGGTAC |
| | | GTGGACGGCGTGGAGGTGCACAACGCCAAGACC |
| | | AAGCCCAGAGAGGAGCAGTTTAACAGCACCTAC |
| | | CGGGTGGTGTCCGTGCTGACCGTGCTGCACCAG |
| | | GACTGGCTGAACGGCAAAGAGTACAAGTGTAAG |
| | | GTCTCCAACAAGGGCCTGCCAAGCAGCATCGAA |
| | | AAGACCATCAGCAAGGCCAAGGGCCAGCCTAGA |
| | | GAGCCCCAGGTCTACACCCTGCCACCCAGCCAA |
| | | GAGGAGATGACCAAGAACCAGGTGTCCCTGACC |
| | | TGTCTGGTGAAGGGCTTCTACCCAAGCGACATC |
| | | GCCGTGGAGTGGGAGAGCAACGGCCAGCCCGAG |
| | | AACAACTACAAGACCACCCCCCCAGTGCTGGAC |
| | | AGCGACGGCAGCTTCTTCCTGTACAGCAGGCTG |
| | | ACCGTGGACAAGTCCAGATGGCAGGAGGGCAAC |
| | | GTCTTTAGCTGCTCCGTGATGCACGAGGCCCTG |
| | | CACAACCACTACACCCAGAAGAGCCTGAGCCTG |
| | | TCCCTGGGC |

BAP049-Clone-A LC

| | | |
|---|---|---|
| SEQ ID NO: 146 (Kabat) | LCDR1 | KSSQSLLDSGNQKNFLT |
| SEQ ID NO: 147 (Kabat) | LCDR2 | WASTRES |
| SEQ ID NO: 166 (Kabat) | LCDR3 | QNDYSYPYT |
| SEQ ID NO: 149 (Chothia) | LCDR1 | SQSLLDSGNQKNF |
| SEQ ID NO: 150 (Chothia) | LCDR2 | WAS |
| SEQ ID NO: 167 (Chothia) | LCDR3 | DYSYPY |
| SEQ ID NO: 176 | VL | EIVLTQSPATLSLSPGERATLSCKSSQSLLDSG |
| | | NQKNFLTWYQQKPGQAPRLLIYWASTRESGVPS |
| | | RFSGSGSGTEFTLTISSLQPDDFATYYCQNDYS |
| | | YPYTFGQGTKVEIK |
| SEQ ID NO: 227 | DNA VL | GAGATCGTGCTGACCCAGTCCCCTGCCACCCTG |
| | | TCACTGTCTCCAGGCGAGAGAGCTACCCTGTCC |
| | | TGCAAGTCCTCCCAGTCCCTGCTGGACTCCGGC |
| | | AACCAGAAGAACTTCCTGACCTGGTATCAGCAG |
| | | AAGCCCGGCCAGGCCCCCAGACTGCTGATCTAC |
| | | TGGGCCTCCACCCGGGAATCTGGCGTGCCCTCT |
| | | AGATTCTCCGGCTCCGGCTCTGGCACCGAGTTT |
| | | ACCCTGACCATCTCCAGCCTGCAGCCCGACGAC |
| | | TTCGCCACCTACTACTGCCAGAACGACTACTCC |
| | | TACCCCTACACCTTCGGCCAGGGCACCAAGGTG |
| | | GAAATCAAG |
| SEQ ID NO: 178 | LC | EIVLTQSPATLSLSPGERATLSCKSSQSLLDSG |
| | | NQKNFLTWYQQKPGQAPRLLIYWASTRESGVPS |
| | | RFSGSGSGTEFTLTISSLQPDDFATYYCQNDYS |
| | | YPYTFGQGTKVEIKRTVAAPSVFIFPPSDEQLK |
| | | SGTASVVCLLNNFYPREAKVQWKVDNALQSGNS |
| | | QESVTEQDSKDSTYSLSSTLTLSKADYEKHKVY |
| | | ACEVTHQGLSSPVTKSFNRGEC |
| SEQ ID NO: 228 | DNA LC | GAGATCGTGCTGACCCAGTCCCCTGCCACCCTG |
| | | TCACTGTCTCCAGGCGAGAGAGCTACCCTGTCC |
| | | TGCAAGTCCTCCCAGTCCCTGCTGGACTCCGGC |
| | | AACCAGAAGAACTTCCTGACCTGGTATCAGCAG |
| | | AAGCCCGGCCAGGCCCCCAGACTGCTGATCTAC |
| | | TGGGCCTCCACCCGGGAATCTGGCGTGCCCTCT |
| | | AGATTCTCCGGCTCCGGCTCTGGCACCGAGTTT |
| | | ACCCTGACCATCTCCAGCCTGCAGCCCGACGAC |
| | | TTCGCCACCTACTACTGCCAGAACGACTACTCC |
| | | TACCCCTACACCTTCGGCCAGGGCACCAAGGTG |
| | | GAAATCAAGCGTACGGTGGCCGCTCCCAGCGTG |
| | | TTCATCTTCCCCCCAAGCGACGAGCAGCTGAAG |
| | | AGCGGCACCGCCAGCGTGGTGTGTCTGCTGAAC |
| | | AACTTCTACCCCAGGGAGGCCAAGGTGCAGTGG |
| | | AAGGTGGACAACGCCCTGCAGAGCGGCAACAGC |
| | | CAGGAGAGCGTCACCGAGCAGGACAGCAAGGAC |
| | | TCCACCTACAGCCTGAGCAGCACCCTGACCCTG |
| | | AGCAAGGCCGACTACGAGAAGCACAAGGTGTAC |
| | | GCCTGTGAGGTGACCCACCAGGGCCTGTCCAGC |
| | | CCCGTGACCAAGAGCTTCAACAGGGGCGAGTGC |

BAP049-Clone-B HC

| | | |
|---|---|---|
| SEQ ID NO: 137 (Kabat) | HCDR1 | TYWMH |
| SEQ ID NO: 138 (Kabat) | HCDR2 | NIYPGTGGSNFDEKFKN |
| SEQ ID NO: 139 (Kabat) | HCDR3 | WTTGTGAY |
| SEQ ID NO: 140 (Chothia) | HCDR1 | GYTFTTY |
| SEQ ID NO: 141 (Chothia) | HCDR2 | YPGTGG |
| SEQ ID NO: 139 (Chothia) | HCDR3 | WTTGTGAY |
| SEQ ID NO: 172 | VH | EVQLVQSGAEVKKPGESLRISCKGSGYTFTTYW |
| | | MHWVRQATGQGLEWMGNIYPGTGGSNFDEKFKN |
| | | RVTITADKSTSTAYMELSSLRSEDTAVYYCTRW |
| | | TTGTGAYWGQGTTVTVSS |
| SEQ ID NO: 229 | DNA VH | GAGGTGCAGCTGGTGCAGTCAGGCGCCGAAGTG |
| | | AAGAAGCCCGGCGAGTCACTGAGAATTAGCTGT |
| | | AAAGGTTCAGGCTACACCTTCACTACCTACTGG |
| | | ATGCACTGGGTCCGCCAGGCTACCGGTCAAGGC |
| | | CTCGAGTGGATGGGTAATATCTACCCCGGCACC |
| | | GGCGGCTCTAACTTCGACGAGAAGTTTAAGAAT |
| | | AGAGTGACTATCACCGCCGATAAGTCTACTAGC |
| | | ACCGCCTATATGGAACTGTCTAGCCTGAGATCA |
| | | GAGGACACCGCCGTCTACTACTGCACTAGGTGG |
| | | ACTACCGGCACAGGCGCCTACTGGGGTCAAGGC |
| | | ACTACCGTGACCGTGTCTAGC |
| SEQ ID NO: 225 | HC | EVQLVQSGAEVKKPGESLRISCKGSGYTFTTYW |
| | | MHWVRQATGQGLEWMGNIYPGTGGSNFDEKFKN |
| | | RVTITADKSTSTAYMELSSLRSEDTAVYYCTRW |
| | | TTGTGAYWGQGTTVTVSSASTKGPSVFPLAPCS |
| | | RSTSESTAALGCLVKDYFPEPVTVSWNSGALTS |
| | | GVHTFPAVLQSSGLYSLSSVVTVPSSSLGTKTY |
| | | TCNVDHKPSNTKVDKRVESKYGPPCPPCPAPEF |
| | | LGGPSVFLFPPKPKDTLMISRTPEVTCVVVDVS |
| | | QEDPEVQFNWYVDGVEVHNAKTKPREEQFNSTY |
| | | RVVSVLTVLHQDWLNGKEYKCKVSNKGLPSSIE |
| | | KTISKAKGQPREPQVYTLPPSQEEMTKNQVSLT |
| | | CLVKGFYPSDIAVEWESNGQPENNYKTTPPVLD |
| | | SDGSFFLYSRLTVDKSRWQEGNVFSCSVMHEAL |
| | | HNHYTQKSLSLSLG |
| SEQ ID NO: 230 | DNA HC | GAGGTGCAGCTGGTGCAGTCAGGCGCCGAAGTG |
| | | AAGAAGCCCGGCGAGTCACTGAGAATTAGCTGT |
| | | AAAGGTTCAGGCTACACCTTCACTACCTACTGG |
| | | ATGCACTGGGTCCGCCAGGCTACCGGTCAAGGC |
| | | CTCGAGTGGATGGGTAATATCTACCCCGGCACC |
| | | GGCGGCTCTAACTTCGACGAGAAGTTTAAGAAT |
| | | AGAGTGACTATCACCGCCGATAAGTCTACTAGC |
| | | ACCGCCTATATGGAACTGTCTAGCCTGAGATCA |
| | | GAGGACACCGCCGTCTACTACTGCACTAGGTGG |
| | | ACTACCGGCACAGGCGCCTACTGGGGTCAAGGC |
| | | ACTACCGTGACCGTGTCTAGCGCTAGCACTAAG |
| | | GGCCCGTCCGTGTTCCCCCTGGCACCTTGTAGC |
| | | CGGAGCACTAGCGAATCCACCGCTGCCCTCGGC |
| | | TGCCTGGTCAAGGATTACTTCCCGGAGCCCGTG |
| | | ACCGTGTCCTGGAACAGCGGAGCCCTGACCTCC |
| | | GGAGTGCACACCTTCCCCGCTGTGCTGCAGAGC |
| | | TCCGGGCTGTACTCGCTGTCGTCGGTGGTCACG |
| | | GTGCCTTCATCTAGCCTGGGTACCAAGACCTAC |
| | | ACTTGCAACGTGGACCACAAGCCTTCCAACACT |
| | | AAGGTGGACAAGCGCGTCGAATCGAAGTACGGC |
| | | CCACCGTGCCCGCCTTGTCCCGCGCCGGAGTTC |
| | | CTCGGCGGTCCCTCGGTCTTTCTGTTCCCACCG |
| | | AAGCCCAAGGACACTTTGATGATTTCCCGCACC |
| | | CCTGAAGTGACATGCGTGGTCGTGGACGTGTCA |
| | | CAGGAAGATCCGGAGGTGCAGTTCAATTGGTAC |
| | | GTGGATGGCGTCGAGGTGCACAACGCCAAAACC |
| | | AAGCCGAGGGAGGAGCAGTTCAACTCCACTTAC |
| | | CGCGTCGTGTCCGTGCTGACGGTGCTGCATCAG |
| | | GACTGGCTGAACGGGAAGGAGTACAAGTGCAAA |
| | | GTGTCCAACAAGGGACTTCCTAGCTCAATCGAA |
| | | AAGACCATCTCGAAAGCCAAGGGACAGCCCCGG |
| | | GAACCCCAAGTGTATACCCTGCCACCGAGCCAG |
| | | GAAGAAATGACTAAGAACCAAGTCTCATTGACT |
| | | TGCCTTGTGAAGGGCTTCTACCCATCGGATATC |
| | | GCCGTGGAATGGGAGTCCAACGGCCAGCCGGAA |
| | | AACAACTACAAGACCACCCCTCCGGTGCTGGAC |
| | | TCAGACGGATCCTTCTTCCTCTACTCGCGGCTG |
| | | ACCGTGGATAAGAGCAGATGGCAGGAGGGAAAT |
| | | GTGTTCAGCTGTTCTGTGATGCATGAAGCCCTG |
| | | CACAACCACTACACTCAGAAGTCCCTGTCCCTC |
| | | TCCCTGGGA |

BAP049-Clone-B LC

| | | |
|---|---|---|
| SEQ ID NO: 146 (Kabat) | LCDR1 | KSSQSLLDSGNQKNFLT |
| SEQ ID NO: 147 (Kabat) | LCDR2 | WASTRES |
| SEQ ID NO: 166 (Kabat) | LCDR3 | QNDYSYPYT |
| SEQ ID NO: 149 (Chothia) | LCDR1 | SQSLLDSGNQKNF |
| SEQ ID NO: 150 (Chothia) | LCDR2 | WAS |
| SEQ ID NO: 167 (Chothia) | LCDR3 | DYSYPY |
| SEQ ID NO: 188 | VL | EIVLTQSPATLSLSPGERATLSCKSSQSLLDSG |
| | | NQKNFLTWYQQKPGKAPKLLIYWASTRESGVPS |
| | | RFSGSGSGTDFTFTISSLQPEDIATYYCQNDYS |
| | | YPYTFGQGTKVEIK |
| SEQ ID NO: 231 | DNA VL | GAGATCGTCCTGACTCAGTCACCCGCTACCCTG |
| | | AGCCTGAGCCCTGGCGAGCGGGCTACACTGAGC |
| | | TGTAAATCTAGTCAGTCACTGCTGGATAGCGGT |
| | | AATCAGAAGAACTTCCTGACCTGGTATCAGCAG |
| | | AAGCCCGGTAAAGCCCCTAAGCTGCTGATCTAC |
| | | TGGGCCTCTACTAGAGAATCAGGCGTGCCCTCT |
| | | AGGTTTAGCGGTAGCGGTAGTGGCACCGACTTC |
| | | ACCTTCACTATCTCTAGCCTGCAGCCCGAGGAT |
| | | ATCGCTACCTACTACTGTCAGAACGACTATAGC |
| | | TACCCCTACACCTTCGGTCAAGGCACTAAGGTC |
| | | GAGATTAAG |
| SEQ ID NO: 190 | LC | EIVLTQSPATLSLSPGERATLSCKSSQSLLDSG |
| | | NQKNFLTWYQQKPGKAPKLLIYWASTRESGVPS |
| | | RFSGSGSGTDFTFTISSLQPEDIATYYCQNDYS |
| | | YPYTFGQGTKVEIKRTVAAPSVFIFPPSDEQLK |
| | | SGTASVVCLLNNFYPREAKVQWKVDNALQSGNS |
| | | QESVTEQDSKDSTYSLSSTLTLSKADYEKHKVY |
| | | ACEVTHQGLSSPVTKSFNRGEC |
| SEQ ID NO: 232 | DNA LC | GAGATCGTCCTGACTCAGTCACCCGCTACCCTG |
| | | AGCCTGAGCCCTGGCGAGCGGGCTACACTGAGC |
| | | TGTAAATCTAGTCAGTCACTGCTGGATAGCGGT |
| | | AATCAGAAGAACTTCCTGACCTGGTATCAGCAG |
| | | AAGCCCGGTAAAGCCCCTAAGCTGCTGATCTAC |
| | | TGGGCCTCTACTAGAGAATCAGGCGTGCCCTCT |
| | | AGGTTTAGCGGTAGCGGTAGTGGCACCGACTTC |
| | | ACCTTCACTATCTCTAGCCTGCAGCCCGAGGAT |
| | | ATCGCTACCTACTACTGTCAGAACGACTATAGC |
| | | TACCCCTACACCTTCGGTCAAGGCACTAAGGTC |
| | | GAGATTAAGCGTACGGTGGCCGCTCCCAGCGTG |
| | | TTCATCTTCCCCCCCAGCGACGAGCAGCTGAAG |
| | | AGCGGCACCGCCAGCGTGGTGTGCCTGCTGAAC |
| | | AACTTCTACCCCCGGGAGGCCAAGGTGCAGTGG |
| | | AAGGTGGACAACGCCCTGCAGAGCGGCAACAGC |
| | | CAGGAGAGCGTCACCGAGCAGGACAGCAAGGAC |
| | | TCCACCTACAGCCTGAGCAGCACCCTGACCCTG |
| | | AGCAAGGCCGACTACGAGAAGCATAAGGTGTAC |
| | | GCCTGCGAGGTGACCCACCAGGGCCTGTCCAGC |
| | | CCCGTGACCAAGAGCTTCAACAGGGGCGAGTGC |

BAP049-Clone-C HC

| | | |
|---|---|---|
| SEQ ID NO: 137 (Kabat) | HCDR1 | TYWMH |
| SEQ ID NO: 138 (Kabat) | HCDR2 | NIYPGTGGSNFDEKFKN |
| SEQ ID NO: 139 (Kabat) | HCDR3 | WTTGTGAY |
| SEQ ID NO: 140 (Chothia) | HCDR1 | GYTFTTY |
| SEQ ID NO: 141 (Chothia) | HCDR2 | YPGTGG |
| SEQ ID NO: 139 (Chothia) | HCDR3 | WTTGTGAY |
| SEQ ID NO: 172 | VH | EVQLVQSGAEVKKPGESLRISCKGSGYTFTTYW |
| | | MHWVRQATGQGLEWMGNIYPGTGGSNFDEKFKN |
| | | RVTITADKSTSTAYMELSSLRSEDTAVYYCTRW |
| | | TTGTGAYWGQGTTVTVSS |
| SEQ ID NO: 224 | DNA VH | GAAGTGCAGCTGGTGCAGTCTGGCGCCGAAGTG |
| | | AAGAAGCCTGGCGAGTCCCTGCGGATCTCCTGC |
| | | AAGGGCTCTGGCTACACCTTCACCACCTACTGG |
| | | ATGCACTGGGTGCGACAGGCTACCGGCCAGGGC |
| | | CTGGAATGGATGGGCAACATCTATCCTGGCACC |
| | | GGCGGCTCCAACTTCGACGAGAAGTTCAAGAAC |
| | | AGAGTGACCATCACCGCCGACAAGTCCACCTCC |
| | | ACCGCCTACATGGAACTGTCCTCCCTGAGATCC |
| | | GAGGACACCGCCGTGTACTACTGCACCCGGTGG |
| | | ACAACCGGCACAGGCGCTTATTGGGGCCAGGGC |
| | | ACCACAGTGACCGTGTCCTCT |
| SEQ ID NO: 225 | HC | EVQLVQSGAEVKKPGESLRISCKGSGYTFTTYW |
| | | MHWVRQATGQGLEWMGNIYPGTGGSNFDEKFKN |
| | | RVTITADKSTSTAYMELSSLRSEDTAVYYCTRW |
| | | TTGTGAYWGQGTTVTVSSASTKGPSVFPLAPCS |
| | | RSTSESTAALGCLVKDYFPEPVTVSWNSGALTS |
| | | GVHTFPAVLQSSGLYSLSSVVTVPSSSLGTKTY |
| | | TCNVDHKPSNTKVDKRVESKYGPPCPPCPAPEF |
| | | LGGPSVFLFPPKPKDTLMISRTPEVTCVVVDVS |
| | | QEDPEVQFNWYVDGVEVHNAKTKPREEQFNSTY |
| | | RVVSVLTVLHQDWLNGKEYKCKVSNKGLPSSIE |
| | | KTISKAKGQPREPQVYTLPPSQEEMTKNQVSLT |
| | | CLVKGFYPSDIAVEWESNGQPENNYKTTPPVLD |
| | | SDGSFFLYSRLTVDKSRWQEGNVFSCSVMHEAL |
| | | HNHYTQKSLSLSLG |
| SEQ ID NO: 226 | DNA HC | GAAGTGCAGCTGGTGCAGTCTGGCGCCGAAGTG |
| | | AAGAAGCCTGGCGAGTCCCTGCGGATCTCCTGC |
| | | AAGGGCTCTGGCTACACCTTCACCACCTACTGG |
| | | ATGCACTGGGTGCGACAGGCTACCGGCCAGGGC |
| | | CTGGAATGGATGGGCAACATCTATCCTGGCACC |
| | | GGCGGCTCCAACTTCGACGAGAAGTTCAAGAAC |
| | | AGAGTGACCATCACCGCCGACAAGTCCACCTCC |
| | | ACCGCCTACATGGAACTGTCCTCCCTGAGATCC |
| | | GAGGACACCGCCGTGTACTACTGCACCCGGTGG |
| | | ACAACCGGCACAGGCGCTTATTGGGGCCAGGGC |
| | | ACCACAGTGACCGTGTCCTCTGCTTCTACCAAG |
| | | GGGCCCAGCGTGTTCCCCCTGGCCCCCTGCTCC |
| | | AGAAGCACCAGCGAGAGCACAGCCGCCCTGGGC |
| | | TGCCTGGTGAAGGACTACTTCCCCGAGCCCGTG |
| | | ACCGTGTCCTGGAACAGCGGAGCCCTGACCAGC |
| | | GGCGTGCACACCTTCCCCGCCGTGCTGCAGAGC |
| | | AGCGGCCTGTACAGCCTGAGCAGCGTGGTGACC |
| | | GTGCCCAGCAGCAGCCTGGGCACCAAGACCTAC |
| | | ACCTGTAACGTGGACCACAAGCCCAGCAACACC |
| | | AAGGTGGACAAGAGGGTGGAGAGCAAGTACGGC |
| | | CCACCCTGCCCCCCCTGCCCAGCCCCCGAGTTC |
| | | CTGGGCGGACCCAGCGTGTTCCTGTTCCCCCCC |
| | | AAGCCCAAGGACACCCTGATGATCAGCAGAACC |
| | | CCCGAGGTGACCTGTGTGGTGGTGGACGTGTCC |
| | | CAGGAGGACCCCGAGGTCCAGTTCAACTGGTAC |
| | | GTGGACGGCGTGGAGGTGCACAACGCCAAGACC |
| | | AAGCCCAGAGAGGAGCAGTTTAACAGCACCTAC |
| | | CGGGTGGTGTCCGTGCTGACCGTGCTGCACCAG |
| | | GACTGGCTGAACGGCAAAGAGTACAAGTGTAAG |
| | | GTCTCCAACAAGGGCCTGCCAAGCAGCATCGAA |
| | | AAGACCATCAGCAAGGCCAAGGGCCAGCCTAGA |
| | | GAGCCCCAGGTCTACACCCTGCCACCCAGCCAA |
| | | GAGGAGATGACCAAGAACCAGGTGTCCCTGACC |
| | | TGTCTGGTGAAGGGCTTCTACCCAAGCGACATC |
| | | GCCGTGGAGTGGGAGAGCAACGGCCAGCCCGAG |
| | | AACAACTACAAGACCACCCCCCCAGTGCTGGAC |
| | | AGCGACGGCAGCTTCTTCCTGTACAGCAGGCTG |
| | | ACCGTGGACAAGTCCAGATGGCAGGAGGGCAAC |
| | | GTCTTTAGCTGCTCCGTGATGCACGAGGCCCTG |
| | | CACAACCACTACACCCAGAAGAGCCTGAGCCTG |
| | | TCCCTGGGC |

BAP049-Clone-C LC

| | | |
|---|---|---|
| SEQ ID NO: 146 (Kabat) | LCDR1 | KSSQSLLDSGNQKNFLT |
| SEQ ID NO: 147 (Kabat) | LCDR2 | WASTRES |
| SEQ ID NO: 166 (Kabat) | LCDR3 | QNDYSYPYT |
| SEQ ID NO: 149 (Chothia) | LCDR1 | SQSLLDSGNQKNF |
| SEQ ID NO: 150 (Chothia) | LCDR2 | WAS |
| SEQ ID NO: 167 (Chothia) | LCDR3 | DYSYPY |
| SEQ ID NO: 200 | VL | EIVLTQSPDFQSVTPKEKVTITCKSSQSLLDSG |
| | | NQKNFLTWYQQKPGQAPRLLIYWASTRESGVPS |
| | | RFSGSGSGTDFTFTISSLEAEDAATYYCQNDYS |
| | | YPYTFGQGTKVEIK |
| SEQ ID NO: 233 | DNA VL | GAGATCGTGCTGACCCAGTCCCCCGACTTCCAG |
| | | TCCGTGACCCCCAAAGAAAAAGTGACCATCACA |
| | | TGCAAGTCCTCCCAGTCCCTGCTGGACTCCGGC |
| | | AACCAGAAGAACTTCCTGACCTGGTATCAGCAG |
| | | AAGCCCGGCCAGGCCCCCAGACTGCTGATCTAC |
| | | TGGGCCTCCACCCGGGAATCTGGCGTGCCCTCT |
| | | AGATTCTCCGGCTCCGGCTCTGGCACCGACTTT |
| | | ACCTTCACCATCTCCAGCCTGGAAGCCGAGGAC |
| | | GCCGCCACCTACTACTGCCAGAACGACTACTCC |
| | | TACCCCTACACCTTCGGCCAGGGCACCAAGGTG |
| | | GAAATCAAG |
| SEQ ID NO: 202 | LC | EIVLTQSPDFQSVTPKEKVTITCKSSQSLLDSG |
| | | NQKNFLTWYQQKPGQAPRLLIYWASTRESGVPS |
| | | RFSGSGSGTDFTFTISSLEAEDAATYYCQNDYS |
| | | YPYTFGQGTKVEIKRTVAAPSVFIFPPSDEQLK |
| | | SGTASVVCLLNNFYPREAKVQWKVDNALQSGNS |
| | | QESVTEQDSKDSTYSLSSTLTLSKADYEKHKVY |
| | | ACEVTHQGLSSPVTKSFNRGEC |
| SEQ ID NO: 234 | DNA LC | GAGATCGTGCTGACCCAGTCCCCCGACTTCCAG |
| | | TCCGTGACCCCCAAAGAAAAAGTGACCATCACA |
| | | TGCAAGTCCTCCCAGTCCCTGCTGGACTCCGGC |
| | | AACCAGAAGAACTTCCTGACCTGGTATCAGCAG |
| | | AAGCCCGGCCAGGCCCCCAGACTGCTGATCTAC |
| | | TGGGCCTCCACCCGGGAATCTGGCGTGCCCTCT |
| | | AGATTCTCCGGCTCCGGCTCTGGCACCGACTTT |
| | | ACCTTCACCATCTCCAGCCTGGAAGCCGAGGAC |
| | | GCCGCCACCTACTACTGCCAGAACGACTACTCC |
| | | TACCCCTACACCTTCGGCCAGGGCACCAAGGTG |
| | | GAAATCAAGCGTACGGTGGCCGCTCCCAGCGTG |
| | | TTCATCTTCCCCCCAAGCGACGAGCAGCTGAAG |
| | | AGCGGCACCGCCAGCGTGGTGTGTCTGCTGAAC |
| | | AACTTCTACCCCAGGGAGGCCAAGGTGCAGTGG |
| | | AAGGTGGACAACGCCCTGCAGAGCGGCAACAGC |
| | | CAGGAGAGCGTCACCGAGCAGGACAGCAAGGAC |
| | | TCCACCTACAGCCTGAGCAGCACCCTGACCCTG |
| | | AGCAAGGCCGACTACGAGAAGCACAAGGTGTAC |
| | | GCCTGTGAGGTGACCCACCAGGGCCTGTCCAGC |
| | | CCCGTGACCAAGAGCTTCAACAGGGGCGAGTGC |

BAP049-Clone-D HC

| | | |
|---|---|---|
| SEQ ID NO: 137 (Kabat) | HCDR1 | TYWMH |
| SEQ ID NO: 138 (Kabat) | HCDR2 | NIYPGTGGSNFDEKFKN |
| SEQ ID NO: 139 (Kabat) | HCDR3 | WTTGTGAY |
| SEQ ID NO: 140 (Chothia) | HCDR1 | GYTFTTY |
| SEQ ID NO: 141 (Chothia) | HCDR2 | YPGTGG |
| SEQ ID NO: 139 (Chothia) | HCDR3 | WTTGTGAY |
| SEQ ID NO: 184 | VH | EVQLVQSGAEVKKPGESLRISCKGSGYTFTTYW |
| | | MHWIRQSPSRGLEWLGNIYPGTGGSNFDEKFKN |
| | | RFTISRDNSKNTLYLQMNSLRAEDTAVYYCTRW |
| | | TTGTGAYWGQGTTVTVSS |
| SEQ ID NO: 235 | DNA VH | GAAGTGCAGCTGGTGCAGTCTGGCGCCGAAGTG |
| | | AAGAAGCCTGGCGAGTCCCTGCGGATCTCCTGC |
| | | AAGGGCTCTGGCTACACCTTCACCACCTACTGG |
| | | ATGCACTGGATCCGGCAGTCCCCCTCTAGGGGC |
| | | CTGGAATGGCTGGGCAACATCTACCCTGGCACC |
| | | GGCGGCTCCAACTTCGACGAGAAGTTCAAGAAC |
| | | AGGTTCACCATCTCCCGGGACAACTCCAAGAAC |
| | | ACCCTGTACCTGCAGATGAACTCCCTGCGGGCC |
| | | GAGGACACCGCCGTGTACTACTGTACCAGATGG |
| | | ACCACCGGAACCGGCGCCTATTGGGGCCAGGGC |
| | | ACAACAGTGACCGTGTCCTCC |
| SEQ ID NO: 236 | HC | EVQLVQSGAEVKKPGESLRISCKGSGYTFTTYW |
| | | MHWIRQSPSRGLEWLGNIYPGTGGSNFDEKFKN |
| | | RFTISRDNSKNTLYLQMNSLRAEDTAVYYCTRW |
| | | TTGTGAYWGQGTTVTVSSASTKGPSVFPLAPCS |
| | | RSTSESTAALGCLVKDYFPEPVTVSWNSGALTS |
| | | GVHTFPAVLQSSGLYSLSSVVTVPSSSLGTKTY |
| | | TCNVDHKPSNTKVDKRVESKYGPPCPPCPAPEF |
| | | LGGPSVFLFPPKPKDTLMISRTPEVTCVVVDVS |
| | | QEDPEVQFNWYVDGVEVHNAKTKPREEQFNSTY |
| | | RVVSVLTVLHQDWLNGKEYKCKVSNKGLPSSIE |
| | | KTISKAKGQPREPQVYTLPPSQEEMTKNQVSLT |
| | | CLVKGFYPSDIAVEWESNGQPENNYKTTPPVLD |
| | | SDGSFFLYSRLTVDKSRWQEGNVFSCSVMHEAL |
| | | HNHYTQKSLSLSLG |
| SEQ ID NO: 237 | DNA HC | GAAGTGCAGCTGGTGCAGTCTGGCGCCGAAGTG |
| | | AAGAAGCCTGGCGAGTCCCTGCGGATCTCCTGC |
| | | AAGGGCTCTGGCTACACCTTCACCACCTACTGG |
| | | ATGCACTGGATCCGGCAGTCCCCCTCTAGGGGC |
| | | CTGGAATGGCTGGGCAACATCTACCCTGGCACC |
| | | GGCGGCTCCAACTTCGACGAGAAGTTCAAGAAC |
| | | AGGTTCACCATCTCCCGGGACAACTCCAAGAAC |
| | | ACCCTGTACCTGCAGATGAACTCCCTGCGGGCC |
| | | GAGGACACCGCCGTGTACTACTGTACCAGATGG |
| | | ACCACCGGAACCGGCGCCTATTGGGGCCAGGGC |
| | | ACAACAGTGACCGTGTCCTCCGCTTCTACCAAG |
| | | GGGCCCAGCGTGTTCCCCCTGGCCCCCTGCTCC |
| | | AGAAGCACCAGCGAGAGCACAGCCGCCCTGGGC |
| | | TGCCTGGTGAAGGACTACTTCCCCGAGCCCGTG |
| | | ACCGTGTCCTGGAACAGCGGAGCCCTGACCAGC |
| | | GGCGTGCACACCTTCCCCGCCGTGCTGCAGAGC |
| | | AGCGGCCTGTACAGCCTGAGCAGCGTGGTGACC |
| | | GTGCCCAGCAGCAGCCTGGGCACCAAGACCTAC |
| | | ACCTGTAACGTGGACCACAAGCCCAGCAACACC |
| | | AAGGTGGACAAGAGGGTGGAGAGCAAGTACGGC |
| | | CCACCCTGCCCCCCCTGCCCAGCCCCCGAGTTC |
| | | CTGGGCGGACCCAGCGTGTTCCTGTTCCCCCCC |
| | | AAGCCCAAGGACACCCTGATGATCAGCAGAACC |
| | | CCCGAGGTGACCTGTGTGGTGGTGGACGTGTCC |
| | | CAGGAGGACCCCGAGGTCCAGTTCAACTGGTAC |
| | | GTGGACGGCGTGGAGGTGCACAACGCCAAGACC |
| | | AAGCCCAGAGAGGAGCAGTTTAACAGCACCTAC |
| | | CGGGTGGTGTCCGTGCTGACCGTGCTGCACCAG |
| | | GACTGGCTGAACGGCAAAGAGTACAAGTGTAAG |
| | | GTCTCCAACAAGGGCCTGCCAAGCAGCATCGAA |
| | | AAGACCATCAGCAAGGCCAAGGGCCAGCCTAGA |
| | | GAGCCCCAGGTCTACACCCTGCCACCCAGCCAA |
| | | GAGGAGATGACCAAGAACCAGGTGTCCCTGACC |
| | | TGTCTGGTGAAGGGCTTCTACCCAAGCGACATC |
| | | GCCGTGGAGTGGGAGAGCAACGGCCAGCCCGAG |
| | | AACAACTACAAGACCACCCCCCCAGTGCTGGAC |
| | | AGCGACGGCAGCTTCTTCCTGTACAGCAGGCTG |
| | | ACCGTGGACAAGTCCAGATGGCAGGAGGGCAAC |
| | | GTCTTTAGCTGCTCCGTGATGCACGAGGCCCTG |
| | | CACAACCACTACACCCAGAAGAGCCTGAGCCTG |
| | | TCCCTGGGC |

BAP049-Clone-D LC

| | | |
|---|---|---|
| SEQ ID NO: 146 (Kabat) | LCDR1 | KSSQSLLDSGNQKNFLT |
| SEQ ID NO: 147 (Kabat) | LCDR2 | WASTRES |
| SEQ ID NO: 166 (Kabat) | LCDR3 | QNDYSYPYT |
| SEQ ID NO: 149 (Chothia) | LCDR1 | SQSLLDSGNQKNF |
| SEQ ID NO: 150 (Chothia) | LCDR2 | WAS |
| SEQ ID NO: 167 (Chothia) | LCDR3 | DYSYPY |
| SEQ ID NO: 204 | VL | EIVLTQSPATLSLSPGERATLSCKSSQSLLDSG |
| | | NQKNFLTWYQQKPGQAPRLLIYWASTRESGVPS |
| | | RFSGSGSGTDFTFTISSLEAEDAATYYCQNDYS |
| | | YPYTFGQGTKVEIK |
| SEQ ID NO: 238 | DNA VL | GAGATCGTGCTGACCCAGTCCCCTGCCACCCTG |
| | | TCACTGTCTCCAGGCGAGAGAGCTACCCTGTCC |
| | | TGCAAGTCCTCCCAGTCCCTGCTGGACTCCGGC |
| | | AACCAGAAGAACTTCCTGACCTGGTATCAGCAG |
| | | AAGCCCGGCCAGGCCCCCAGACTGCTGATCTAC |
| | | TGGGCCTCCACCCGGGAATCTGGCGTGCCCTCT |
| | | AGATTCTCCGGCTCCGGCTCTGGCACCGACTTT |
| | | ACCTTCACCATCTCCAGCCTGGAAGCCGAGGAC |
| | | GCCGCCACCTACTACTGCCAGAACGACTACTCC |
| | | TACCCCTACACCTTCGGCCAGGGCACCAAGGTG |
| | | GAAATCAAG |
| SEQ ID NO: 206 | LC | EIVLTQSPATLSLSPGERATLSCKSSQSLLDSG |
| | | NQKNFLTWYQQKPGQAPRLLIYWASTRESGVPS |
| | | RFSGSGSGTDFTFTISSLEAEDAATYYCQNDYS |
| | | YPYTFGQGTKVEIKRTVAAPSVFIFPPSDEQLK |
| | | SGTASVVCLLNNFYPREAKVQWKVDNALQSGNS |
| | | QESVTEQDSKDSTYSLSSTLTLSKADYEKHKVY |
| | | ACEVTHQGLSSPVTKSFNRGEC |
| SEQ ID NO: 239 | DNA LC | GAGATCGTGCTGACCCAGTCCCCTGCCACCCTG |
| | | TCACTGTCTCCAGGCGAGAGAGCTACCCTGTCC |
| | | TGCAAGTCCTCCCAGTCCCTGCTGGACTCCGGC |
| | | AACCAGAAGAACTTCCTGACCTGGTATCAGCAG |
| | | AAGCCCGGCCAGGCCCCCAGACTGCTGATCTAC |
| | | TGGGCCTCCACCCGGGAATCTGGCGTGCCCTCT |
| | | AGATTCTCCGGCTCCGGCTCTGGCACCGACTTT |
| | | ACCTTCACCATCTCCAGCCTGGAAGCCGAGGAC |
| | | GCCGCCACCTACTACTGCCAGAACGACTACTCC |
| | | TACCCCTACACCTTCGGCCAGGGCACCAAGGTG |
| | | GAAATCAAGCGTACGGTGGCCGCTCCCAGCGTG |
| | | TTCATCTTCCCCCCAAGCGACGAGCAGCTGAAG |
| | | AGCGGCACCGCCAGCGTGGTGTGTCTGCTGAAC |
| | | AACTTCTACCCCAGGGAGGCCAAGGTGCAGTGG |
| | | AAGGTGGACAACGCCCTGCAGAGCGGCAACAGC |
| | | CAGGAGAGCGTCACCGAGCAGGACAGCAAGGAC |
| | | TCCACCTACAGCCTGAGCAGCACCCTGACCCTG |
| | | AGCAAGGCCGACTACGAGAAGCACAAGGTGTAC |
| | | GCCTGTGAGGTGACCCACCAGGGCCTGTCCAGC |
| | | CCCGTGACCAAGAGCTTCAACAGGGGCGAGTGC |

BAP049-Clone-E HC

| | | |
|---|---|---|
| SEQ ID NO: 137 (Kabat) | HCDR1 | TYWMH |
| SEQ ID NO: 138 (Kabat) | HCDR2 | NIYPGTGGSNFDEKFKN |
| SEQ ID NO: 139 (Kabat) | HCDR3 | WTTGTGAY |
| SEQ ID NO: 140 (Chothia) | HCDR1 | GYTFTTY |
| SEQ ID NO: 141 (Chothia) | HCDR2 | YPGTGG |
| SEQ ID NO: 139 (Chothia) | HCDR3 | WTTGTGAY |
| SEQ ID NO: 172 | VH | EVQLVQSGAEVKKPGESLRISCKGSGYTFTTYW |
| | | MHWVRQATGQGLEWMGNIYPGTGGSNFDEKFKN |
| | | RVTITADKSTSTAYMELSSLRSEDTAVYYCTRW |
| | | TTGTGAYWGQGTTVTVSS |
| SEQ ID NO: 229 | DNA VH | GAGGTGCAGCTGGTGCAGTCAGGCGCCGAAGTG |
| | | AAGAAGCCCGGCGAGTCACTGAGAATTAGCTGT |
| | | AAAGGTTCAGGCTACACCTTCACTACCTACTGG |
| | | ATGCACTGGGTCCGCCAGGCTACCGGTCAAGGC |
| | | CTCGAGTGGATGGGTAATATCTACCCCGGCACC |
| | | GGCGGCTCTAACTTCGACGAGAAGTTTAAGAAT |
| | | AGAGTGACTATCACCGCCGATAAGTCTACTAGC |
| | | ACCGCCTATATGGAACTGTCTAGCCTGAGATCA |
| | | GAGGACACCGCCGTCTACTACTGCACTAGGTGG |
| | | ACTACCGGCACAGGCGCCTACTGGGGTCAAGGC |
| | | ACTACCGTGACCGTGTCTAGC |
| SEQ ID NO: 225 | HC | EVQLVQSGAEVKKPGESLRISCKGSGYTFTTYW |
| | | MHWVRQATGQGLEWMGNIYPGTGGSNFDEKFKN |
| | | RVTITADKSTSTAYMELSSLRSEDTAVYYCTRW |
| | | TTGTGAYWGQGTTVTVSSASTKGPSVFPLAPCS |
| | | RSTSESTAALGCLVKDYFPEPVTVSWNSGALTS |
| | | GVHTFPAVLQSSGLYSLSSVVTVPSSSLGTKTY |
| | | TCNVDHKPSNTKVDKRVESKYGPPCPPCPAPEF |
| | | LGGPSVFLFPPKPKDTLMISRTPEVTCVVVDVS |
| | | QEDPEVQFNWYVDGVEVHNAKTKPREEQFNSTY |
| | | RVVSVLTVLHQDWLNGKEYKCKVSNKGLPSSIE |
| | | KTISKAKGQPREPQVYTLPPSQEEMTKNQVSLT |
| | | CLVKGFYPSDIAVEWESNGQPENNYKTTPPVLD |
| | | SDGSFFLYSRLTVDKSRWQEGNVFSCSVMHEAL |
| | | HNHYTQKSLSLSLG |
| SEQ ID NO: 230 | DNA HC | GAGGTGCAGCTGGTGCAGTCAGGCGCCGAAGTG |
| | | AAGAAGCCCGGCGAGTCACTGAGAATTAGCTGT |
| | | AAAGGTTCAGGCTACACCTTCACTACCTACTGG |
| | | ATGCACTGGGTCCGCCAGGCTACCGGTCAAGGC |
| | | CTCGAGTGGATGGGTAATATCTACCCCGGCACC |
| | | GGCGGCTCTAACTTCGACGAGAAGTTTAAGAAT |
| | | AGAGTGACTATCACCGCCGATAAGTCTACTAGC |
| | | ACCGCCTATATGGAACTGTCTAGCCTGAGATCA |
| | | GAGGACACCGCCGTCTACTACTGCACTAGGTGG |
| | | ACTACCGGCACAGGCGCCTACTGGGGTCAAGGC |
| | | ACTACCGTGACCGTGTCTAGCGCTAGCACTAAG |
| | | GGCCCGTCCGTGTTCCCCCTGGCACCTTGTAGC |
| | | CGGAGCACTAGCGAATCCACCGCTGCCCTCGGC |
| | | TGCCTGGTCAAGGATTACTTCCCGGAGCCCGTG |
| | | ACCGTGTCCTGGAACAGCGGAGCCCTGACCTCC |
| | | GGAGTGCACACCTTCCCCGCTGTGCTGCAGAGC |
| | | TCCGGGCTGTACTCGCTGTCGTCGGTGGTCACG |
| | | GTGCCTTCATCTAGCCTGGGTACCAAGACCTAC |
| | | ACTTGCAACGTGGACCACAAGCCTTCCAACACT |
| | | AAGGTGGACAAGCGCGTCGAATCGAAGTACGGC |
| | | CCACCGTGCCCGCCTTGTCCCGCGCCGGAGTTC |
| | | CTCGGCGGTCCCTCGGTCTTTCTGTTCCCACCG |
| | | AAGCCCAAGGACACTTTGATGATTTCCCGCACC |
| | | CCTGAAGTGACATGCGTGGTCGTGGACGTGTCA |
| | | CAGGAAGATCCGGAGGTGCAGTTCAATTGGTAC |
| | | GTGGATGGCGTCGAGGTGCACAACGCCAAAACC |
| | | AAGCCGAGGGAGGAGCAGTTCAACTCCACTTAC |
| | | CGCGTCGTGTCCGTGCTGACGGTGCTGCATCAG |
| | | GACTGGCTGAACGGGAAGGAGTACAAGTGCAAA |
| | | GTGTCCAACAAGGGACTTCCTAGCTCAATCGAA |
| | | AAGACCATCTCGAAAGCCAAGGGACAGCCCCGG |
| | | GAACCCCAAGTGTATACCCTGCCACCGAGCCAG |
| | | GAAGAAATGACTAAGAACCAAGTCTCATTGACT |
| | | TGCCTTGTGAAGGGCTTCTACCCATCGGATATC |
| | | GCCGTGGAATGGGAGTCCAACGGCCAGCCGGAA |
| | | AACAACTACAAGACCACCCCTCCGGTGCTGGAC |
| | | TCAGACGGATCCTTCTTCCTCTACTCGCGGCTG |
| | | ACCGTGGATAAGAGCAGATGGCAGGAGGGAAAT |
| | | GTGTTCAGCTGTTCTGTGATGCATGAAGCCCTG |
| | | CACAACCACTACACTCAGAAGTCCCTGTCCCTC |
| | | TCCCTGGGA |

BAP049-Clone-E LC

| | | |
|---|---|---|
| SEQ ID NO: 146 (Kabat) | LCDR1 | KSSQSLLDSGNQKNFLT |
| SEQ ID NO: 147 (Kabat) | LCDR2 | WASTRES |
| SEQ ID NO: 166 (Kabat) | LCDR3 | QNDYSYPYT |
| SEQ ID NO: 149 (Chothia) | LCDR1 | SQSLLDSGNQKNF |
| SEQ ID NO: 150 (Chothia) | LCDR2 | WAS |
| SEQ ID NO: 167 (Chothia) | LCDR3 | DYSYPY |
| SEQ ID NO: 204 | VL | EIVLTQSPATLSLSPGERATLSCKSSQSLLDSG |
| | | NQKNFLTWYQQKPGQAPRLLIYWASTRESGVPS |
| | | RFSGSGSGTDFTFTISSLEAEDAATYYCQNDYS |
| | | YPYTFGQGTKVEIK |
| SEQ ID NO: 240 | DNA VL | GAGATCGTCCTGACTCAGTCACCCGCTACCCTG |
| | | AGCCTGAGCCCTGGCGAGCGGGCTACACTGAGC |
| | | TGTAAATCTAGTCAGTCACTGCTGGATAGCGGT |
| | | AATCAGAAGAACTTCCTGACCTGGTATCAGCAG |
| | | AAGCCCGGTCAAGCCCCTAGACTGCTGATCTAC |
| | | TGGGCCTCTACTAGAGAATCAGGCGTGCCCTCT |
| | | AGGTTTAGCGGTAGCGGTAGTGGCACCGACTTC |
| | | ACCTTCACTATCTCTAGCCTGGAAGCCGAGGAC |
| | | GCCGCTACCTACTACTGTCAGAACGACTATAGC |
| | | TACCCCTACACCTTCGGTCAAGGCACTAAGGTC |
| | | GAGATTAAG |
| SEQ ID NO: 206 | LC | EIVLTQSPATLSLSPGERATLSCKSSQSLLDSG |
| | | NQKNFLTWYQQKPGQAPRLLIYWASTRESGVPS |
| | | RFSGSGSGTDFTFTISSLEAEDAATYYCQNDYS |
| | | YPYTFGQGTKVEIKRTVAAPSVFIFPPSDEQLK |
| | | SGTASVVCLLNNFYPREAKVQWKVDNALQSGNS |
| | | QESVTEQDSKDSTYSLSSTLTLSKADYEKHKVY |
| | | ACEVTHQGLSSPVTKSFNRGEC |
| SEQ ID NO: 241 | DNA LC | GAGATCGTCCTGACTCAGTCACCCGCTACCCTG |
| | | AGCCTGAGCCCTGGCGAGCGGGCTACACTGAGC |
| | | TGTAAATCTAGTCAGTCACTGCTGGATAGCGGT |
| | | AATCAGAAGAACTTCCTGACCTGGTATCAGCAG |
| | | AAGCCCGGTCAAGCCCCTAGACTGCTGATCTAC |
| | | TGGGCCTCTACTAGAGAATCAGGCGTGCCCTCT |
| | | AGGTTTAGCGGTAGCGGTAGTGGCACCGACTTC |
| | | ACCTTCACTATCTCTAGCCTGGAAGCCGAGGAC |
| | | GCCGCTACCTACTACTGTCAGAACGACTATAGC |
| | | TACCCCTACACCTTCGGTCAAGGCACTAAGGTC |
| | | GAGATTAAGCGTACGGTGGCCGCTCCCAGCGTG |
| | | TTCATCTTCCCCCCCAGCGACGAGCAGCTGAAG |
| | | AGCGGCACCGCCAGCGTGGTGTGCCTGCTGAAC |
| | | AACTTCTACCCCCGGGAGGCCAAGGTGCAGTGG |
| | | AAGGTGGACAACGCCCTGCAGAGCGGCAACAGC |
| | | CAGGAGAGCGTCACCGAGCAGGACAGCAAGGAC |
| | | TCCACCTACAGCCTGAGCAGCACCCTGACCCTG |
| | | AGCAAGGCCGACTACGAGAAGCATAAGGTGTAC |
| | | GCCTGCGAGGTGACCCACCAGGGCCTGTCCAGC |
| | | CCCGTGACCAAGAGCTTCAACAGGGGCGAGTGC |

BAP049 HC

| | | |
|---|---|---|
| SEQ ID NO: 242 (Kabat) | HCDR1 | ACTTACTGGATGCAC |
| SEQ ID NO: 243 (Kabat) | HCDR2 | AATATTTATCCTGGTACTGGTGGTTCTAACTTC |
| | | GATGAGAAGTTCAAGAAC |
| SEQ ID NO: 244 (Kabat) | HCDR3 | TGGACTACTGGGACGGGAGCTTAT |
| SEQ ID NO: 245 (Chothia) | HCDR1 | GGCTACACATTCACCACTTAC |
| SEQ ID NO: 246 (Chothia) | HCDR2 | TATCCTGGTACTGGTGGT |
| SEQ ID NO: 244 (Chothia) | HCDR3 | TGGACTACTGGGACGGGAGCTTAT |

BAP049 LC

| | | |
|---|---|---|
| SEQ ID NO: 247 (Kabat) | LCDR1 | AAGTCCAGTCAGAGTCTGTTAGACAGTGGAAAT |
| | | CAAAAGAACTTCTTGACC |
| SEQ ID NO: 248 (Kabat) | LCDR2 | TGGGCATCCACTAGGGAATCT |
| SEQ ID NO: 249 (Kabat) | LCDR3 | CAGAATGATTATAGTTATCCGTGCACG |
| SEQ ID NO: 250 (Chothia) | LCDR1 | AGTCAGAGTCTGTTAGACAGTGGAAATCAAAAG |
| | | AACTTC |
| SEQ ID NO: 251 (Chothia) | LCDR2 | TGGGCATCC |
| SEQ ID NO: 252 (Chothia) | LCDR3 | GATTATAGTTATCCGTGC |

BAP049-chi HC

| | | |
|---|---|---|
| SEQ ID NO: 242 (Kabat) | HCDR1 | ACTTACTGGATGCAC |
| SEQ ID NO: 243 (Kabat) | HCDR2 | AATATTTATCCTGGTACTGGTGGTTCTAACTTC |
| | | GATGAGAAGTTCAAGAAC |
| SEQ ID NO: 244 (Kabat) | HCDR3 | TGGACTACTGGGACGGGAGCTTAT |
| SEQ ID NO: 245 (Chothia) | HCDR1 | GGCTACACATTCACCACTTAC |
| SEQ ID NO: 246 (Chothia) | HCDR2 | TATCCTGGTACTGGTGGT |
| SEQ ID NO: 244 (Chothia) | HCDR3 | TGGACTACTGGGACGGGAGCTTAT |

BAP049-chi LC

| | | |
|---|---|---|
| SEQ ID NO: 247 (Kabat) | LCDR1 | AAGTCCAGTCAGAGTCTGTTAGACAGTGGAAAT |
| | | CAAAAGAACTTCTTGACC |
| SEQ ID NO: 248 (Kabat) | LCDR2 | TGGGCATCCACTAGGGAATCT |
| SEQ ID NO: 249 (Kabat) | LCDR3 | CAGAATGATTATAGTTATCCGTGCACG |
| SEQ ID NO: 250 (Chothia) | LCDR1 | AGTCAGAGTCTGTTAGACAGTGGAAATCAAAAG |
| | | AACTTC |
| SEQ ID NO: 251 (Chothia) | LCDR2 | TGGGCATCC |
| SEQ ID NO: 252 (Chothia) | LCDR3 | GATTATAGTTATCCGTGC |

BAP049-chi Y HC

| | | |
|---|---|---|
| SEQ ID NO: 242 (Kabat) | HCDR1 | ACTTACTGGATGCAC |
| SEQ ID NO: 243 (Kabat) | HCDR2 | AATATTTATCCTGGTACTGGTGGTTCTAACTTC |
| | | GATGAGAAGTTCAAGAAC |
| SEQ ID NO: 244 (Kabat) | HCDR3 | TGGACTACTGGGACGGGAGCTTAT |
| SEQ ID NO: 245 (Chothia) | HCDR1 | GGCTACACATTCACCACTTAC |
| SEQ ID NO: 246 (Chothia) | HCDR2 | TATCCTGGTACTGGTGGT |
| SEQ ID NO: 244 (Chothia) | HCDR3 | TGGACTACTGGGACGGGAGCTTAT |

BAP049-chi Y LC

| | | |
|---|---|---|
| SEQ ID NO: 247 (Kabat) | LCDR1 | AAGTCCAGTCAGAGTCTGTTAGACAGTGGAAAT |
| | | CAAAAGAACTTCTTGACC |
| SEQ ID NO: 248 (Kabat) | LCDR2 | TGGGCATCCACTAGGGAATCT |
| SEQ ID NO: 253 (Kabat) | LCDR3 | CAGAATGATTATAGTTATCCGTACACG |
| SEQ ID NO: 250 (Chothia) | LCDR1 | AGTCAGAGTCTGTTAGACAGTGGAAATCAAAAG |
| | | AACTTC |
| SEQ ID NO: 251 (Chothia) | LCDR2 | TGGGCATCC |
| SEQ ID NO: 254 (Chothia) | LCDR3 | GATTATAGTTATCCGTAC |

BAP049-hum01 HC

| | | |
|---|---|---|
| SEQ ID NO: 242 (Kabat) | HCDR1 | ACTTACTGGATGCAC |
| SEQ ID NO: 243 (Kabat) | HCDR2 | AATATTTATCCTGGTACTGGTGGTTCTAACTTC |
| SEQ ID NO: 244 (Kabat) | HCDR3 | GATGAGAAGTTCAAGAAC |
| | | TGGACTACTGGGACGGGAGCTTAT |
| SEQ ID NO: 245 (Chothia) | HCDR1 | GGCTACACATTCACCACTTAC |
| SEQ ID NO: 246 (Chothia) | HCDR2 | TATCCTGGTACTGGTGGT |
| SEQ ID NO: 244 (Chothia) | HCDR3 | TGGACTACTGGGACGGGAGCTTAT |

BAP049-hum01 LC

| | | |
|---|---|---|
| SEQ ID NO: 247 (Kabat) | LCDR1 | AAGTCCAGTCAGAGTCTGTTAGACAGTGGAAAT |
| | | CAAAAGAACTTCTTGACC |
| SEQ ID NO: 248 (Kabat) | LCDR2 | TGGGCATCCACTAGGGAATCT |
| SEQ ID NO: 253 (Kabat) | LCDR3 | CAGAATGATTATAGTTATCCGTACACG |
| SEQ ID NO: 250 (Chothia) | LCDR1 | AGTCAGAGTCTGTTAGACAGTGGAAATCAAAAG |
| | | AACTTC |
| SEQ ID NO: 251 (Chothia) | LCDR2 | TGGGCATCC |
| SEQ ID NO: 254 (Chothia) | LCDR3 | GATTATAGTTATCCGTAC |

BAP049-hum02 HC

| | | |
|---|---|---|
| SEQ ID NO: 242 (Kabat) | HCDR1 | ACTTACTGGATGCAC |
| SEQ ID NO: 243 (Kabat) | HCDR2 | AATATTTATCCTGGTACTGGTGGTTCTAACTTC |
| | | GATGAGAAGTTCAAGAAC |
| SEQ ID NO: 244 (Kabat) | HCDR3 | TGGACTACTGGGACGGGAGCTTAT |
| SEQ ID NO: 245 (Chothia) | HCDR1 | GGCTACACATTCACCACTTAC |
| SEQ ID NO: 246 (Chothia) | HCDR2 | TATCCTGGTACTGGTGGT |
| SEQ ID NO: 244 (Chothia) | HCDR3 | TGGACTACTGGGACGGGAGCTTAT |

BAP049-hum02 LC

| | | |
|---|---|---|
| SEQ ID NO: 247 (Kabat) | LCDR1 | AAGTCCAGTCAGAGTCTGTTAGACAGTGGAAAT |
| | | CAAAAGAACTTCTTGACC |
| SEQ ID NO: 248 (Kabat) | LCDR2 | TGGGCATCCACTAGGGAATCT |
| SEQ ID NO: 253 (Kabat) | LCDR3 | CAGAATGATTATAGTTATCCGTACACG |
| SEQ ID NO: 250 (Chothia) | LCDR1 | AGTCAGAGTCTGTTAGACAGTGGAAATCAAAAG |
| | | AACTTC |
| SEQ ID NO: 251 (Chothia) | LCDR2 | TGGGCATCC |
| SEQ ID NO: 254 (Chothia) | LCDR3 | GATTATAGTTATCCGTAC |

BAP049-hum03 HC

| | | |
|---|---|---|
| SEQ ID NO: 242 (Kabat) | HCDR1 | ACTTACTGGATGCAC |
| SEQ ID NO: 243 (Kabat) | HCDR2 | AATATTTATCCTGGTACTGGTGGTTCTAACTTC |
| | | GATGAGAAGTTCAAGAAC |
| SEQ ID NO: 244 (Kabat) | HCDR3 | TGGACTACTGGGACGGGAGCTTAT |
| SEQ ID NO: 245 (Chothia) | HCDR1 | GGCTACACATTCACCACTTAC |
| SEQ ID NO: 246 (Chothia) | HCDR2 | TATCCTGGTACTGGTGGT |
| SEQ ID NO: 244 (Chothia) | HCDR3 | TGGACTACTGGGACGGGAGCTTAT |

BAP049-hum03 LC

| | | |
|---|---|---|
| SEQ ID NO: 247 (Kabat) | LCDR1 | AAGTCCAGTCAGAGTCTGTTAGACAGTGGAAAT |
| | | CAAAAGAACTTCTTGACC |
| SEQ ID NO: 248 (Kabat) | LCDR2 | TGGGCATCCACTAGGGAATCT |
| SEQ ID NO: 253 (Kabat) | LCDR3 | CAGAATGATTATAGTTATCCGTACACG |
| SEQ ID NO: 250 (Chothia) | LCDR1 | AGTCAGAGTCTGTTAGACAGTGGAAATCAAAAG |
| | | AACTTC |
| SEQ ID NO: 251 (Chothia) | LCDR2 | TGGGCATCC |
| SEQ ID NO: 254 (Chothia) | LCDR3 | GATTATAGTTATCCGTAC |

BAP049-hum04 HC

| | | |
|---|---|---|
| SEQ ID NO: 242 (Kabat) | HCDR1 | ACTTACTGGATGCAC |
| SEQ ID NO: 243 (Kabat) | HCDR2 | AATATTTATCCTGGTACTGGTGGTTCTAACTTC |
| | | GATGAGAAGTTCAAGAAC |
| SEQ ID NO: 244 (Kabat) | HCDR3 | TGGACTACTGGGACGGGAGCTTAT |
| SEQ ID NO: 245 (Chothia) | HCDR1 | GGCTACACATTCACCACTTAC |
| SEQ ID NO: 246 (Chothia) | HCDR2 | TATCCTGGTACTGGTGGT |
| SEQ ID NO: 244 (Chothia) | HCDR3 | TGGACTACTGGGACGGGAGCTTAT |

BAP049-hum04 LC

| | | |
|---|---|---|
| SEQ ID NO: 247 (Kabat) | LCDR1 | AAGTCCAGTCAGAGTCTGTTAGACAGTGGAAAT |
| | | CAAAAGAACTTCTTGACC |
| SEQ ID NO: 248 (Kabat) | LCDR2 | TGGGCATCCACTAGGGAATCT |
| SEQ ID NO: 253 (Kabat) | LCDR3 | CAGAATGATTATAGTTATCCGTACACG |
| SEQ ID NO: 250 (Chothia) | LCDR1 | AGTCAGAGTCTGTTAGACAGTGGAAATCAAAAG |
| | | AACTTC |
| SEQ ID NO: 251 (Chothia) | LCDR2 | TGGGCATCC |
| SEQ ID NO: 254 (Chothia) | LCDR3 | GATTATAGTTATCCGTAC |

BAP049-hum05 HC

| | | |
|---|---|---|
| SEQ ID NO: 242 (Kabat) | HCDR1 | ACTTACTGGATGCAC |
| SEQ ID NO: 243 (Kabat) | HCDR2 | AATATTTATCCTGGTACTGGTGGTTCTAACTTC |
| | | GATGAGAAGTTCAAGAAC |
| SEQ ID NO: 244 (Kabat) | HCDR3 | TGGACTACTGGGACGGGAGCTTAT |
| SEQ ID NO: 245 (Chothia) | HCDR1 | GGCTACACATTCACCACTTAC |
| SEQ ID NO: 246 (Chothia) | HCDR2 | TATCCTGGTACTGGTGGT |
| SEQ ID NO: 244 (Chothia) | HCDR3 | TGGACTACTGGGACGGGAGCTTAT |

BAP049-hum05 LC

| | | |
|---|---|---|
| SEQ ID NO: 247 (Kabat) | LCDR1 | AAGTCCAGTCAGAGTCTGTTAGACAGTGGAAAT |
| | | CAAAAGAACTTCTTGACC |
| SEQ ID NO: 248 (Kabat) | LCDR2 | TGGGCATCCACTAGGGAATCT |
| SEQ ID NO: 253 (Kabat) | LCDR3 | CAGAATGATTATAGTTATCCGTACACG |
| SEQ ID NO: 250 (Chothia) | LCDR1 | AGTCAGAGTCTGTTAGACAGTGGAAATCAAAAG |
| | | AACTTC |
| SEQ ID NO: 251 (Chothia) | LCDR2 | TGGGCATCC |
| SEQ ID NO: 254 (Chothia) | LCDR3 | GATTATAGTTATCCGTAC |

BAP049-hum06 HC

| | | |
|---|---|---|
| SEQ ID NO: 242 (Kabat) | HCDR1 | ACTTACTGGATGCAC |
| SEQ ID NO: 243 (Kabat) | HCDR2 | AATATTTATCCTGGTACTGGTGGTTCTAACTTC |
| | | GATGAGAAGTTCAAGAAC |
| SEQ ID NO: 244 (Kabat) | HCDR3 | TGGACTACTGGGACGGGAGCTTAT |
| SEQ ID NO: 245 (Chothia) | HCDR1 | GGCTACACATTCACCACTTAC |
| SEQ ID NO: 246 (Chothia) | HCDR2 | TATCCTGGTACTGGTGGT |
| SEQ ID NO: 244 (Chothia) | HCDR3 | TGGACTACTGGGACGGGAGCTTAT |

BAP049-hum06 LC

| | | |
|---|---|---|
| SEQ ID NO: 247 (Kabat) | LCDR1 | AAGTCCAGTCAGAGTCTGTTAGACAGTGGAAAT |
| | | CAAAAGAACTTCTTGACC |
| SEQ ID NO: 248 (Kabat) | LCDR2 | TGGGCATCCACTAGGGAATCT |
| SEQ ID NO: 253 (Kabat) | LCDR3 | CAGAATGATTATAGTTATCCGTACACG |
| SEQ ID NO: 250 (Chothia) | LCDR1 | AGTCAGAGTCTGTTAGACAGTGGAAATCAAAAG |
| | | AACTTC |
| SEQ ID NO: 251 (Chothia) | LCDR2 | TGGGCATCC |
| SEQ ID NO: 254 (Chothia) | LCDR3 | GATTATAGTTATCCGTAC |

BAP049-hum07 HC

| | | |
|---|---|---|
| SEQ ID NO: 242 (Kabat) | HCDR1 | ACTTACTGGATGCAC |
| SEQ ID NO: 243 (Kabat) | HCDR2 | AATATTTATCCTGGTACTGGTGGTTCTAACTTC |
| | | GATGAGAAGTTCAAGAAC |
| SEQ ID NO: 244 (Kabat) | HCDR3 | TGGACTACTGGGACGGGAGCTTAT |
| SEQ ID NO: 245 (Chothia) | HCDR1 | GGCTACACATTCACCACTTAC |
| SEQ ID NO: 246 (Chothia) | HCDR2 | TATCCTGGTACTGGTGGT |
| SEQ ID NO: 244 (Chothia) | HCDR3 | TGGACTACTGGGACGGGAGCTTAT |

BAP049-hum07 LC

| | | |
|---|---|---|
| SEQ ID NO: 247 (Kabat) | LCDR1 | AAGTCCAGTCAGAGTCTGTTAGACAGTGGAAAT |
| | | CAAAAGAACTTCTTGACC |
| SEQ ID NO: 248 (Kabat) | LCDR2 | TGGGCATCCACTAGGGAATCT |
| SEQ ID NO: 253 (Kabat) | LCDR3 | CAGAATGATTATAGTTATCCGTACACG |
| SEQ ID NO: 250 (Chothia) | LCDR1 | AGTCAGAGTCTGTTAGACAGTGGAAATCAAAAG |
| | | AACTTC |
| SEQ ID NO: 251 (Chothia) | LCDR2 | TGGGCATCC |
| SEQ ID NO: 254 (Chothia) | LCDR3 | GATTATAGTTATCCGTAC |

BAP049-hum08 HC

| | | |
|---|---|---|
| SEQ ID NO: 242 (Kabat) | HCDR1 | ACTTACTGGATGCAC |
| SEQ ID NO: 243 (Kabat) | HCDR2 | AATATTTATCCTGGTACTGGTGGTTCTAACTTC |
| | | GATGAGAAGTTCAAGAAC |
| SEQ ID NO: 244 (Kabat) | HCDR3 | TGGACTACTGGGACGGGAGCTTAT |
| SEQ ID NO: 245 (Chothia) | HCDR1 | GGCTACACATTCACCACTTAC |
| SEQ ID NO: 246 (Chothia) | HCDR2 | TATCCTGGTACTGGTGGT |
| SEQ ID NO: 244 (Chothia) | HCDR3 | TGGACTACTGGGACGGGAGCTTAT |

BAP049-hum08 LC

| | | |
|---|---|---|
| SEQ ID NO: 247 (Kabat) | LCDR1 | AAGTCCAGTCAGAGTCTGTTAGACAGTGGAAAT |
| | | CAAAAGAACTTCTTGACC |
| SEQ ID NO: 248 (Kabat) | LCDR2 | TGGGCATCCACTAGGGAATCT |
| SEQ ID NO: 253 (Kabat) | LCDR3 | CAGAATGATTATAGTTATCCGTACACG |
| SEQ ID NO: 250 (Chothia) | LCDR1 | AGTCAGAGTCTGTTAGACAGTGGAAATCAAAAG |
| | | AACTTC |
| SEQ ID NO: 251 (Chothia) | LCDR2 | TGGGCATCC |
| SEQ ID NO: 254 (Chothia) | LCDR3 | GATTATAGTTATCCGTAC |

BAP049-hum09 HC

| | | |
|---|---|---|
| SEQ ID NO: 242 (Kabat) | HCDR1 | ACTTACTGGATGCAC |
| SEQ ID NO: 243 (Kabat) | HCDR2 | AATATTTATCCTGGTACTGGTGGTTCTAACTTC |
| | | GATGAGAAGTTCAAGAAC |
| SEQ ID NO: 244 (Kabat) | HCDR3 | TGGACTACTGGGACGGGAGCTTAT |
| SEQ ID NO: 245 (Chothia) | HCDR1 | GGCTACACATTCACCACTTAC |
| SEQ ID NO: 246 (Chothia) | HCDR2 | TATCCTGGTACTGGTGGT |
| SEQ ID NO: 244 (Chothia) | HCDR3 | TGGACTACTGGGACGGGAGCTTAT |

BAP049-hum09 LC

| | | |
|---|---|---|
| SEQ ID NO: 247 (Kabat) | LCDR1 | AAGTCCAGTCAGAGTCTGTTAGACAGTGGAAAT |
| | | CAAAAGAACTTCTTGACC |
| SEQ ID NO: 248 (Kabat) | LCDR2 | TGGGCATCCACTAGGGAATCT |
| SEQ ID NO: 253 (Kabat) | LCDR3 | CAGAATGATTATAGTTATCCGTACACG |
| SEQ ID NO: 250 (Chothia) | LCDR1 | AGTCAGAGTCTGTTAGACAGTGGAAATCAAAAG |
| | | AACTTC |
| SEQ ID NO: 251 (Chothia) | LCDR2 | TGGGCATCC |
| SEQ ID NO: 254 (Chothia) | LCDR3 | GATTATAGTTATCCGTAC |

BAP049-hum10 HC

| | | |
|---|---|---|
| SEQ ID NO: 242 (Kabat) | HCDR1 | ACTTACTGGATGCAC |
| SEQ ID NO: 243 (Kabat) | HCDR2 | AATATTTATCCTGGTACTGGTGGTTCTAACTTC |
| | | GATGAGAAGTTCAAGAAC |
| SEQ ID NO: 244 (Kabat) | HCDR3 | TGGACTACTGGGACGGGAGCTTAT |
| SEQ ID NO: 245 (Chothia) | HCDR1 | GGCTACACATTCACCACTTAC |
| SEQ ID NO: 246 (Chothia) | HCDR2 | TATCCTGGTACTGGTGGT |
| SEQ ID NO: 244 (Chothia) | HCDR3 | TGGACTACTGGGACGGGAGCTTAT |

BAP049-hum10 LC

| | | |
|---|---|---|
| SEQ ID NO: 247 (Kabat) | LCDR1 | AAGTCCAGTCAGAGTCTGTTAGACAGTGGAAAT |
| | | CAAAAGAACTTCTTGACC |
| SEQ ID NO: 248 (Kabat) | LCDR2 | TGGGCATCCACTAGGGAATCT |
| SEQ ID NO: 253 (Kabat) | LCDR3 | CAGAATGATTATAGTTATCCGTACACG |
| SEQ ID NO: 250 (Chothia) | LCDR1 | AGTCAGAGTCTGTTAGACAGTGGAAATCAAAAG |
| | | AACTTC |
| SEQ ID NO: 251 (Chothia) | LCDR2 | TGGGCATCC |
| SEQ ID NO: 254 (Chothia) | LCDR3 | GATTATAGTTATCCGTAC |

BAP049-hum11 HC

| | | |
|---|---|---|
| SEQ ID NO: 242 (Kabat) | HCDR1 | ACTTACTGGATGCAC |
| SEQ ID NO: 243 (Kabat) | HCDR2 | AATATTTATCCTGGTACTGGTGGTTCTAACTTC |
| | | GATGAGAAGTTCAAGAAC |
| SEQ ID NO: 244 (Kabat) | HCDR3 | TGGACTACTGGGACGGGAGCTTAT |
| SEQ ID NO: 245 (Chothia) | HCDR1 | GGCTACACATTCACCACTTAC |
| SEQ ID NO: 246 (Chothia) | HCDR2 | TATCCTGGTACTGGTGGT |
| SEQ ID NO: 244 (Chothia) | HCDR3 | TGGACTACTGGGACGGGAGCTTAT |

BAP049-hum11 LC

| | | |
|---|---|---|
| SEQ ID NO: 247 (Kabat) | LCDR1 | AAGTCCAGTCAGAGTCTGTTAGACAGTGGAAAT |
| | | CAAAAGAACTTCTTGACC |
| SEQ ID NO: 248 (Kabat) | LCDR2 | TGGGCATCCACTAGGGAATCT |
| SEQ ID NO: 253 (Kabat) | LCDR3 | CAGAATGATTATAGTTATCCGTACACG |
| SEQ ID NO: 250 (Chothia) | LCDR1 | AGTCAGAGTCTGTTAGACAGTGGAAATCAAAAG |
| | | AACTTC |
| SEQ ID NO: 251 (Chothia) | LCDR2 | TGGGCATCC |
| SEQ ID NO: 254 (Chothia) | LCDR3 | GATTATAGTTATCCGTAC |

BAP049-hum12 HC

| | | |
|---|---|---|
| SEQ ID NO: 242 (Kabat) | HCDR1 | ACTTACTGGATGCAC |
| SEQ ID NO: 243 (Kabat) | HCDR2 | AATATTTATCCTGGTACTGGTGGTTCTAACTTC |
| | | GATGAGAAGTTCAAGAAC |
| SEQ ID NO: 244 (Kabat) | HCDR3 | TGGACTACTGGGACGGGAGCTTAT |
| SEQ ID NO: 245 (Chothia) | HCDR1 | GGCTACACATTCACCACTTAC |
| SEQ ID NO: 246 (Chothia) | HCDR2 | TATCCTGGTACTGGTGGT |
| SEQ ID NO: 244 (Chothia) | HCDR3 | TGGACTACTGGGACGGGAGCTTAT |

BAP049-hum12 LC

| | | |
|---|---|---|
| SEQ ID NO: 247 (Kabat) | LCDR1 | AAGTCCAGTCAGAGTCTGTTAGACAGTGGAAAT |
| | | CAAAAGAACTTCTTGACC |
| SEQ ID NO: 248 (Kabat) | LCDR2 | TGGGCATCCACTAGGGAATCT |
| SEQ ID NO: 253 (Kabat) | LCDR3 | CAGAATGATTATAGTTATCCGTACACG |
| SEQ ID NO: 250 (Chothia) | LCDR1 | AGTCAGAGTCTGTTAGACAGTGGAAATCAAAAG |
| | | AACTTC |
| SEQ ID NO: 251 (Chothia) | LCDR2 | TGGGCATCC |
| SEQ ID NO: 254 (Chothia) | LCDR3 | GATTATAGTTATCCGTAC |

BAP049-hum13 HC

| | | |
|---|---|---|
| SEQ ID NO: 242 (Kabat) | HCDR1 | ACTTACTGGATGCAC |
| SEQ ID NO: 243 (Kabat) | HCDR2 | AATATTTATCCTGGTACTGGTGGTTCTAACTTC |
| | | GATGAGAAGTTCAAGAAC |
| SEQ ID NO: 244 (Kabat) | HCDR3 | TGGACTACTGGGACGGGAGCTTAT |
| SEQ ID NO: 245 (Chothia) | HCDR1 | GGCTACACATTCACCACTTAC |
| SEQ ID NO: 246 (Chothia) | HCDR2 | TATCCTGGTACTGGTGGT |
| SEQ ID NO: 244 (Chothia) | HCDR3 | TGGACTACTGGGACGGGAGCTTAT |

BAP049-hum13 LC

| | | |
|---|---|---|
| SEQ ID NO: 285 (Kabat) | LCDR1 | AAGTCCAGTCAGAGTCTGTTAGACAGTGGAAAT |
| | | CAAAAGAACTTCTTAACC |
| SEQ ID NO: 248 (Kabat) | LCDR2 | TGGGCATCCACTAGGGAATCT |
| SEQ ID NO: 253 (Kabat) | LCDR3 | CAGAATGATTATAGTTATCCGTACACG |
| SEQ ID NO: 250 (Chothia) | LCDR1 | AGTCAGAGTCTGTTAGACAGTGGAAATCAAAAG |
| | | AACTTC |
| SEQ ID NO: 251 (Chothia) | LCDR2 | TGGGCATCC |
| SEQ ID NO: 254 (Chothia) | LCDR3 | GATTATAGTTATCCGTAC |

BAP049-hum14 HC

| | | |
|---|---|---|
| SEQ ID NO: 242 (Kabat) | HCDR1 | ACTTACTGGATGCAC |
| SEQ ID NO: 243 (Kabat) | HCDR2 | AATATTTATCCTGGTACTGGTGGTTCTAACTTC |
| | | GATGAGAAGTTCAAGAAC |
| SEQ ID NO: 255 (Kabat) | HCDR3 | TGGACTACTGGGACGGGAGCTTAC |
| SEQ ID NO: 245 (Chothia) | HCDR1 | GGCTACACATTCACCACTTAC |
| SEQ ID NO: 246 (Chothia) | HCDR2 | TATCCTGGTACTGGTGGT |
| SEQ ID NO: 255 (Chothia) | HCDR3 | TGGACTACTGGGACGGGAGCTTAC |

BAP049-hum14 LC

| | | |
|---|---|---|
| SEQ ID NO: 247 (Kabat) | LCDR1 | AAGTCCAGTCAGAGTCTGTTAGACAGTGGAAAT |
| | | CAAAAGAACTTCTTGACC |
| SEQ ID NO: 248 (Kabat) | LCDR2 | TGGGCATCCACTAGGGAATCT |
| SEQ ID NO: 253 (Kabat) | LCDR3 | CAGAATGATTATAGTTATCCGTACACG |
| SEQ ID NO: 250 (Chothia) | LCDR1 | AGTCAGAGTCTGTTAGACAGTGGAAATCAAAAG |
| | | AACTTC |
| SEQ ID NO: 251 (Chothia) | LCDR2 | TGGGCATCC |
| SEQ ID NO: 254 (Chothia) | LCDR3 | GATTATAGTTATCCGTAC |

BAP049-hum15 HC

| | | |
|---|---|---|
| SEQ ID NO: 242 (Kabat) | HCDR1 | ACTTACTGGATGCAC |
| SEQ ID NO: 243 (Kabat) | HCDR2 | AATATTTATCCTGGTACTGGTGGTTCTAACTTC |
| | | GATGAGAAGTTCAAGAAC |
| SEQ ID NO: 255 (Kabat) | HCDR3 | TGGACTACTGGGACGGGAGCTTAC |
| SEQ ID NO: 245 (Chothia) | HCDR1 | GGCTACACATTCACCACTTAC |
| SEQ ID NO: 246 (Chothia) | HCDR2 | TATCCTGGTACTGGTGGT |
| SEQ ID NO: 255 (Chothia) | HCDR3 | TGGACTACTGGGACGGGAGCTTAC |

BAP049-hum15 LC

| | | |
|---|---|---|
| SEQ ID NO: 247 (Kabat) | LCDR1 | AAGTCCAGTCAGAGTCTGTTAGACAGTGGAAAT |
| | | CAAAAGAACTTCTTGACC |
| SEQ ID NO: 248 (Kabat) | LCDR2 | TGGGCATCCACTAGGGAATCT |
| SEQ ID NO: 253 (Kabat) | LCDR3 | CAGAATGATTATAGTTATCCGTACACG |
| SEQ ID NO: 250 (Chothia) | LCDR1 | AGTCAGAGTCTGTTAGACAGTGGAAATCAAAAG |
| | | AACTTC |
| SEQ ID NO: 251 (Chothia) | LCDR2 | TGGGCATCC |
| SEQ ID NO: 254 (Chothia) | LCDR3 | GATTATAGTTATCCGTAC |

BAP049-hum16 HC

| | | |
|---|---|---|
| SEQ ID NO: 242 (Kabat) | HCDR1 | ACTTACTGGATGCAC |
| SEQ ID NO: 243 (Kabat) | HCDR2 | AATATTTATCCTGGTACTGGTGGTTCTAACTTC |
| | | GATGAGAAGTTCAAGAAC |
| SEQ ID NO: 244 (Kabat) | HCDR3 | TGGACTACTGGGACGGGAGCTTAT |
| SEQ ID NO: 245 (Chothia) | HCDR1 | GGCTACACATTCACCACTTAC |
| SEQ ID NO: 246 (Chothia) | HCDR2 | TATCCTGGTACTGGTGGT |
| SEQ ID NO: 244 (Chothia) | HCDR3 | TGGACTACTGGGACGGGAGCTTAT |

BAP049-hum16 LC

| | | |
|---|---|---|
| SEQ ID NO: 247 (Kabat) | LCDR1 | AAGTCCAGTCAGAGTCTGTTAGACAGTGGAAAT |
| | | CAAAAGAACTTCTTGACC |
| SEQ ID NO: 248 (Kabat) | LCDR2 | TGGGCATCCACTAGGGAATCT |
| SEQ ID NO: 253 (Kabat) | LCDR3 | CAGAATGATTATAGTTATCCGTACACG |
| SEQ ID NO: 250 (Chothia) | LCDR1 | AGTCAGAGTCTGTTAGACAGTGGAAATCAAAAG |
| | | AACTTC |
| SEQ ID NO: 251 (Chothia) | LCDR2 | TGGGCATCC |
| SEQ ID NO: 254 (Chothia) | LCDR3 | GATTATAGTTATCCGTAC |

BAP049-Clone-A HC

| | | |
|---|---|---|
| SEQ ID NO: 256 (Kabat) | HCDR1 | ACCTACTGGATGCAC |
| SEQ ID NO: 257 (Kabat) | HCDR2 | AACATCTATCCTGGCACCGGCGGCTCCAACTTC |
| | | GACGAGAAGTTCAAGAAC |
| SEQ ID NO: 258 (Kabat) | HCDR3 | TGGACAACCGGCACAGGCGCTTAT |
| SEQ ID NO: 259 (Chothia) | HCDR1 | GGCTACACCTTCACCACCTAC |
| SEQ ID NO: 260 (Chothia) | HCDR2 | TATCCTGGCACCGGCGGC |
| SEQ ID NO: 258 (Chothia) | HCDR3 | TGGACAACCGGCACAGGCGCTTAT |

BAP049-Clone-A LC

| | | |
|---|---|---|
| SEQ ID NO: 261 (Kabat) | LCDR1 | AAGTCCTCCCAGTCCCTGCTGGACTCCGGCAAC |
| | | CAGAAGAACTTCCTGACC |
| SEQ ID NO: 262 (Kabat) | LCDR2 | TGGGCCTCCACCCGGGAATCT |
| SEQ ID NO: 263 (Kabat) | LCDR3 | CAGAACGACTACTCCTACCCCTACACC |
| SEQ ID NO: 264 (Chothia) | LCDR1 | TCCCAGTCCCTGCTGGACTCCGGCAACCAGAAG |
| | | AACTTC |
| SEQ ID NO: 265 (Chothia) | LCDR2 | TGGGCCTCC |
| SEQ ID NO: 266 (Chothia) | LCDR3 | GACTACTCCTACCCCTAC |

BAP049-Clone-B HC

| | | |
|---|---|---|
| SEQ ID NO: 267 (Kabat) | HCDR1 | ACCTACTGGATGCAC |
| SEQ ID NO: 268 (Kabat) | HCDR2 | AATATCTACCCCGGCACCGGCGGCTCTAACTTC |
| | | GACGAGAAGTTTAAGAAT |
| SEQ ID NO: 269 (Kabat) | HCDR3 | TGGACTACCGGCACAGGCGCCTAC |
| SEQ ID NO: 270 (Chothia) | HCDR1 | GGCTACACCTTCACTACCTAC |
| SEQ ID NO: 271 (Chothia) | HCDR2 | TACCCCGGCACCGGCGGC |
| SEQ ID NO: 269 (Chothia) | HCDR3 | TGGACTACCGGCACAGGCGCCTAC |

BAP049-Clone-B LC

| | | |
|---|---|---|
| SEQ ID NO: 272 (Kabat) | LCDR1 | AAATCTAGTCAGTCACTGCTGGATAGCGGTAAT |
| | | CAGAAGAACTTCCTGACC |
| SEQ ID NO: 273 (Kabat) | LCDR2 | TGGGCCTCTACTAGAGAATCA |
| SEQ ID NO: 274 (Kabat) | LCDR3 | CAGAACGACTATAGCTACCCCTACACC |
| SEQ ID NO: 275 (Chothia) | LCDR1 | AGTCAGTCACTGCTGGATAGCGGTAATCAGAAG |
| | | AACTTC |
| SEQ ID NO: 276 (Chothia) | LCDR2 | TGGGCCTCT |
| SEQ ID NO: 277 (Chothia) | LCDR3 | GACTATAGCTACCCCTAC |

BAP049-Clone-C HC

| | | |
|---|---|---|
| SEQ ID NO: 256 (Kabat) | HCDR1 | ACCTACTGGATGCAC |
| SEQ ID NO: 257 (Kabat) | HCDR2 | AACATCTATCCTGGCACCGGCGGCTCCAACTTC |
| | | GACGAGAAGTTCAAGAAC |
| SEQ ID NO: 258 (Kabat) | HCDR3 | TGGACAACCGGCACAGGCGCTTAT |
| SEQ ID NO: 259 (Chothia) | HCDR1 | GGCTACACCTTCACCACCTAC |
| SEQ ID NO: 260 (Chothia) | HCDR2 | TATCCTGGCACCGGCGGC |
| SEQ ID NO: 258 (Chothia) | HCDR3 | TGGACAACCGGCACAGGCGCTTAT |

BAP049-Clone-C LC

| | | |
|---|---|---|
| SEQ ID NO: 261 (Kabat) | LCDR1 | AAGTCCTCCCAGTCCCTGCTGGACTCCGGCAAC |
| | | CAGAAGAACTTCCTGACC |
| SEQ ID NO: 262 (Kabat) | LCDR2 | TGGGCCTCCACCCGGGAATCT |
| SEQ ID NO: 263 (Kabat) | LCDR3 | CAGAACGACTACTCCTACCCCTACACC |
| SEQ ID NO: 264 (Chothia) | LCDR1 | TCCCAGTCCCTGCTGGACTCCGGCAACCAGAAG |
| | | AACTTC |
| SEQ ID NO: 265 (Chothia) | LCDR2 | TGGGCCTCC |
| SEQ ID NO: 266 (Chothia) | LCDR3 | GACTACTCCTACCCCTAC |

BAP049-Clone-D HC

| | | |
|---|---|---|
| SEQ ID NO: 256 (Kabat) | HCDR1 | ACCTACTGGATGCAC |
| SEQ ID NO: 278 (Kabat) | HCDR2 | AACATCTACCCTGGCACCGGCGGCTCCAACTTC |
| | | GACGAGAAGTTCAAGAAC |
| SEQ ID NO: 279 (Kabat) | HCDR3 | TGGACCACCGGAACCGGCGCCTAT |
| SEQ ID NO: 259 (Chothia) | HCDR1 | GGCTACACCTTCACCACCTAC |
| SEQ ID NO: 280 (Chothia) | HCDR2 | TACCCTGGCACCGGCGGC |
| SEQ ID NO: 279 (Chothia) | HCDR3 | TGGACCACCGGAACCGGCGCCTAT |

BAP049-Clone-D LC

| | | |
|---|---|---|
| SEQ ID NO: 261 (Kabat) | LCDR1 | AAGTCCTCCCAGTCCCTGCTGGACTCCGGCAAC |
| | | CAGAAGAACTTCCTGACC |
| SEQ ID NO: 262 (Kabat) | LCDR2 | TGGGCCTCCACCCGGGAATCT |
| SEQ ID NO: 263 (Kabat) | LCDR3 | CAGAACGACTACTCCTACCCCTACACC |
| SEQ ID NO: 264 (Chothia) | LCDR1 | TCCCAGTCCCTGCTGGACTCCGGCAACCAGAAG |
| | | AACTTC |
| SEQ ID NO: 265 (Chothia) | LCDR2 | TGGGCCTCC |
| SEQ ID NO: 266 (Chothia) | LCDR3 | GACTACTCCTACCCCTAC |

BAP049-Clone-E HC

| | | |
|---|---|---|
| SEQ ID NO: 267 (Kabat) | HCDR1 | ACCTACTGGATGCAC |
| SEQ ID NO: 268 (Kabat) | HCDR2 | AATATCTACCCCGGCACCGGCGGCTCTAACTTC |
| | | GACGAGAAGTTTAAGAAT |
| SEQ ID NO: 269 (Kabat) | HCDR3 | TGGACTACCGGCACAGGCGCCTAC |
| SEQ ID NO: 270 (Chothia) | HCDR1 | GGCTACACCTTCACTACCTAC |
| SEQ ID NO: 271 (Chothia) | HCDR2 | TACCCCGGCACCGGCGGC |
| SEQ ID NO: 269 (Chothia) | HCDR3 | TGGACTACCGGCACAGGCGCCTAC |

BAP049-Clone-E LC

| | | |
|---|---|---|
| SEQ ID NO: 272 (Kabat) | LCDR1 | AAATCTAGTCAGTCACTGCTGGATAGCGGTAAT |
| | | CAGAAGAACTTCCTGACC |
| SEQ ID NO: 273 (Kabat) | LCDR2 | TGGGCCTCTACTAGAGAATCA |
| SEQ ID NO: 274 (Kabat) | LCDR3 | CAGAACGACTATAGCTACCCCTACACC |
| SEQ ID NO: 275 (Chothia) | LCDR1 | AGTCAGTCACTGCTGGATAGCGGTAATCAGAAG |
| | | AACTTC |
| SEQ ID NO: 276 (Chothia) | LCDR2 | TGGGCCTCT |
| SEQ ID NO: 277 (Chothia) | LCDR3 | GACTATAGCTACCCCTAC |

[0828] In embodiments, an inhibitor of PD-1 is a molecule other than an antibody or fragment thereof. In embodiments, an inhibitior of PD-1 comprises a RNA molecule, e.g., dsRNA molecule, e.g., a a dsRNA molecule (e.g., an RNAi agents such as a shRNA, siRNA, miRNA, clustered regularly interspaced short palindromic repeats (CRISPR), transcription-activator like effector nuclease (TALEN), or zinc finger endonuclease (ZFN)) that targets and modulates or regulates, e.g., inhibits, PD-1, as described, e.g., in paragraph [00489] and Tables 16 and 17 of International Publication WO2015/090230, filed December 19, 2014, which is incorporated by reference in its entirety.

[0829] Antibodies, antibody fragments, and other inhibitors of PD-1, PD-L1 and PD-L2 are available in the art and may be used combination with a CAR-expressing cell of the present disclosure described herein. In some embodiments, the PD-1 inhibitor is chosen from PDR001 (Novartis), Nivolumab (Bristol-Myers Squibb), Pembrolizumab (Merck & Co), Pidilizumab (CureTech), MEDI0680 (Medimmune), REGN2810 (Regeneron), TSR-042 (Tesaro), PF-06801591 (Pfizer), BGB-A317 (Beigene), BGB-108 (Beigene), INCSHR1210 (Incyte), or AMP-224 (Amplimmune).

[0830] Nivolumab (also referred to as BMS-936558 or MDX1106; Bristol-Myers Squibb) is a fully human IgG4 monoclonal antibody which specifically blocks PD-1. Nivolumab (clone 5C4) and other human monoclonal antibodies that specifically bind to PD-1 are disclosed in U.S. Pat. No. 8,008,449 and WO2006/121168.

[0831] In some embodiments, the anti-PD-1 antibody is Nivolumab. Alternative names for Nivolumab include MDX-1106, MDX-1106-04, ONO-4538, OPDIVO® or BMS-936558. In some embodiments, the anti-PD-1 antibody is Nivolumab (CAS Registry Number: 946414-94-4). Nivolumab is a fully human IgG4 monoclonal antibody which specifically blocks PD1. Nivolumab (clone 5C4) and other human monoclonal antibodies that specifically bind to PD1 are disclosed in U.S. Pat. No. 8,008,449 and WO2006/121168. In one embodiment, the inhibitor of PD-1 is Nivolumab, and having a sequence disclosed herein (or a sequence substantially identical or similar thereto, e.g., a sequence at least 85%, 90%, 95% identical or higher to the sequence specified). In one embodiment, the anti-PD-1 antibody molecule comprises one or more of the CDR sequences (or collectively all of the CDR sequences), the heavy chain or light chain variable region sequence, or the heavy chain or light chain sequence of Nivolumab.

[0832] The heavy and light chain amino acid sequences of Nivolumab are as follows:

Heavy chain
(SEQ ID NO: 281)
QVQLVESGGGVVQPGRSLRLDCKASGITFSNSGMHWVRQAPGKGLEWVAV
IWYDGSKRYYADSVKGRFTISRDNSKNTLFLQMNSLRAEDTAVYYCATND
DYWGQGTLVTVSSASTKGPSVFPLAPCSRSTSESTAALGCLVKDYFPEPV
TVSWNSGALTSGVHTFPAVLQSSGLYSLSSVVTVPSSSLGTKTYTCNVDH
KPSNTKVDKRVESKYGPPCPPCPAPEFLGGPSVFLFPPKPKDTLMISRTP
EVTCVVVDVSQEDPEVQFNWYVDGVEVHNAKTKPREEQFNSTYRVVSVLT
VLHQDWLNGKEYKCKVSNKGLPSSIEKTISKAKGQPREPQVYTLPPSQEE
MTKNQVSLTCLVKGFYPSDIAVEWESNGQPENNYKTTPPVLDSDGSFFLY
SRLTVDKSRWQEGNVFSCSVMHEALHNHYTQKSLSLSLGK
Light chain
(SEQ ID NO: 282)
EIVLTQSPATLSLSPGERATLSCRASQSVSSYLAWYQQKPGQAPRLLIYD
ASNRATGIPARFSGSGSGTDFTLTISSLEPEDFAVYYCQQSSNWPRTFGQ
GTKVEIKRTVAAPSVFIFPPSDEQLKSGTASVVCLLNNFYPREAKVQWKV
DNALQSGNSQESVTEQDSKDSTYSLSSTLTLSKADYEKHKVYACEVTHQG
LSSPVTKSFNRGEC

[0833] Pembrolizumab (formerly known as lambrolizumab, and also referred to as MK03475; Merck) is a humanized IgG4 monoclonal antibody that binds to PD-1. Pembrolizumab and other humanized anti-PD-1 antibodies are disclosed in U.S. Pat. No. 8,354,509 and WO2009/114335. AMP-224 (B7-DCIg; Amplimmune; e.g., disclosed in WO2010/027827 and WO2011/066342), is a PD-L2 Fc fusion soluble receptor that blocks the interaction between PD-1 and B7-H1. Other anti-PD-1 antibodies include AMP 514 (Amplimmune), among others, e.g., anti-PD-1 antibodies disclosed in U.S. Pat. No. 8,609,089, US 2010028330, and/or US 20120114649.

[0834] In some embodiments, the anti-PD-1 antibody is Pembrolizumab. Pembrolizumab (also referred to as Lambrolizumab, MK-3475, MK03475, SCH-900475 or KEYTRUDA®; Merck) is a humanized IgG4 monoclonal antibody that binds to PD-1. Pembrolizumab and other humanized anti-PD-1 antibodies are disclosed in Hamid, O. et al. (2013) New England Journal of Medicine 369 (2): 134-44, U.S. Pat. No. 8,354,509 and WO2009/114335.

### Pembrolizumab

[0835] In one embodiment, the inhibitor of PD-1 is Pembrolizumab disclosed in, e.g., U.S. Pat. No. 8,354,509 and WO 2009/114335, and having a sequence disclosed herein (or a sequence substantially identical or similar thereto, e.g., a sequence at least 85%, 90%, 95% identical or higher to the sequence specified). In one embodiment, the anti-PD-1 antibody molecule comprises one or more of the CDR sequences (or collectively all of the CDR sequences), the heavy chain or light chain variable region sequence, or the heavy chain or light chain sequence of Pembrolizumab.

[0836] In some embodiments, the anti-PD1 antibody molecule comprises:
[0837] (i) a heavy chain variable (VH) region comprising a VHCDR1 amino acid sequence of SEQ ID NO: 530; a VHCDR2 amino acid sequence of SEQ ID NO: 531; and a VHCDR3 amino acid sequence of SEQ ID NO: 532; and
[0838] (ii) a light chain variable (VL) region comprising a VLCDR1 amino acid sequence of SEQ ID NO: 527; a VLCDR2 amino acid sequence of SEQ ID NO: 528; and a VLCDR3 amino acid sequence of SEQ ID NO: 529,
   or a sequence similar thereto, e.g., a sequence at least 85%, 90%, 95% identical or higher.

[0839] In other embodiments, the anti-PD1 antibody molecule comprises a heavy chain comprising the amino acid of SEQ ID NO: 283, and a light chain comprising the amino acid of SEQ ID NO: 284, or a sequence identical or similar thereto, e.g., a sequence at least 85%, 90%, 95% identical or higher.

[0840] Amino acid sequences of the heavy chain, light chain, heavy chain CDRs, and light chain CDRs of Pembrolizumab are as disclosed below:

Heavy chain
(SEQ ID NO: 283)
QVQLVQSGVE VKKPGASVKV SCKASGYTFT NYYMYWVRQA PGQGLEWMGG 50
INPSNGGTNF NEKFKNRVTL TTDSSTTTAY MELKSLQFDD TAVYYCARRD 100
YRFDMGFDYW GQGTTVTVSS ASTKGPSVFP LAPCSRSTSE STAALGCLVK 150
DYFPEPVTVS WNSGALTSGV HTFPAVLQSS GLYSLSSVVT VPSSSLGTKT 200
YTCNVDHKPS NTKVDKRVES KYGPPCPPCP APEFLGGPSV FLFPPKPKDT 250
LMISRTPEVT CVVVDVSQED PEVQFNWYVD GVEVHNAKTK PREEQFNSTY 300
RVVSVLTVLH QDWLNGKEYK CKVSNKGLPS SIEKTISKAK GQPREPQVYT 350
LPPSQEEMTK NQVSLTCLVK GFYPSDIAVE WESNGQPENN YKTTPPVLDS 400
DGSFFLYSRL TVDKSRWQEG NVFSCSVMHE ALHNHYTQKS LSLSLGK 447
Light chain
(SEQ ID NO: 284)
EIVLTQSPAT LSLSPGERAT LSCRASKGVS TSGYSYLHWY QQKPGQAPRL 50
LIYLASYLES GVPARFSGSG SGTDFTLTIS SLEPEDFAVY YCQHSRDLPL 100
TFGGGTKVEI KRTVAAPSVF IFPPSDEQLK SGTASVVCLL NNFYPREAKV 150
QWKVDNALQS GNSQESVTEQ DSKDSTYSLS STLTLSKADY EKHKVYACEV 200
THQGLSSPVT KSFNRGEC 218
Light chain CDR1:
(SEQ ID NO: 527)
RASKGVSTSGYSYLH
Light chain CDR2:
(SEQ ID NO: 528)
LASYLES
Light chain CDR3:
(SEQ ID NO: 529)
QHSRDLPLT
Heavy chain CDR1:
(SEQ ID NO: 530)
NYYMY
Heavy chain CDR2:
(SEQ ID NO: 531)
GINPSNGGTNFNEKFKN
Heavy chain CDR3:
(SEQ ID NO: 532)
RDYRFDMGFDY

[0841] In some embodiments, the anti-PD-1 antibody is Pidilizumab. Pidilizumab (CT-011; Cure Tech) is a humanized IgGlk monoclonal antibody that binds to PD1. Pidilizumab and other humanized anti-PD-1 monoclonal antibodies are disclosed in WO2009/101611, Rosenblatt, J. etal. (2011) J Immunotherapy 34(5): 409-18, U.S. Pat. No. 7,695,715, U.S. Pat. No. 7,332,582, and U.S. Pat. No. 8,686,119, incorporated by reference in their entirety. In one embodiment, the anti-PD-1 antibody molecule comprises one or more of the CDR sequences (or collectively all of the CDR sequences), the heavy chain or light chain variable region sequence, or the heavy chain or light chain sequence of Pidilizumab.

[0842] In one embodiment, the anti-PD-1 antibody molecule is MEDI0680 (Medimmune), also known as AMP-514. MEDI0680 and other anti-PD-1 antibodies are disclosed in U.S. Pat. No. 9,205,148 and WO 2012/145493, incorporated by reference in their entirety. In one embodiment, the anti-PD-1 antibody molecule comprises one or more of the CDR sequences (or collectively all of the CDR sequences), the heavy chain or light chain variable region sequence, or the heavy chain or light chain sequence of MEDI0680.

[0843] In one embodiment, the anti-PD-1 antibody molecule is REGN2810 (Regeneron). In one embodiment, the anti-PD-1 antibody molecule comprises one or more of the CDR sequences (or collectively all of the CDR sequences), the heavy chain or light chain variable region sequence, or the heavy chain or light chain sequence of REGN2810.

[0844] In one embodiment, the anti-PD-1 antibody molecule is PF-06801591 (Pfizer). In one embodiment, the anti-PD-1 antibody molecule comprises one or more of the CDR sequences (or collectively all of the CDR sequences), the heavy chain or light chain variable region sequence, or the heavy chain or light chain sequence of PF-06801591.

[0845] In one embodiment, the anti-PD-1 antibody molecule is BGB-A317 or BGB-108 (Beigene). In one embodiment, the anti-PD-1 antibody molecule comprises one or more of the CDR sequences (or collectively all of the CDR sequences), the heavy chain or light chain variable region sequence, or the heavy chain or light chain sequence of BGB-A317 or BGB-108.

[0846] In one embodiment, the anti-PD-1 antibody molecule is INCSHR1210 (Incyte), also known as INCSHR01210 or SHR-1210. In one embodiment, the anti-PD-1 antibody molecule comprises one or more of the CDR sequences (or collectively all of the CDR sequences), the heavy chain or light chain variable region sequence, or the heavy chain or light chain sequence of INCSHR1210.

[0847] In one embodiment, the anti-PD-1 antibody molecule is TSR-042 (Tesaro), also known as ANB011. In one embodiment, the anti-PD-1 antibody molecule comprises one or more of the CDR sequences (or collectively all of the CDR sequences), the heavy chain or light chain variable region sequence, or the heavy chain or light chain sequence of TSR-042.

[0848] Other anti-PD1 antibodies include AMP 514 (Amplimmune), among others, e.g., anti-PD1 antibodies disclosed in U.S. Pat. No. 8,609,089, US 2010028330, and/or US 20120114649. Further known anti-PD-1 antibodies include those described, e.g., in WO 2015/112800, WO 2016/092419, WO 2015/085847, WO 2014/179664, WO 2014/194302, WO 2014/209804, WO 2015/200119, U.S. Pat. No. 8,735,553, U.S. Pat. No. 7,488,802, U.S. Pat. No. 8,927,697, U.S. Pat. No. 8,993,731, and U.S. Pat. No. 9,102,727, incorporated by reference in their entirety.

[0849] In one embodiment, the anti-PD-1 antibody is an antibody that competes for binding with, and/or binds to the same epitope on PD-1 as, one of the anti-PD-1 antibodies described herein.

[0850] In one embodiment, the PD-1 inhibitor is a peptide that inhibits the PD-1 signaling pathway, e.g., as described in U.S. Pat. No. 8,907,053, incorporated by reference in its entirety. In some embodiments, the PD-1 inhibitor is an immunoadhesin (e.g., an immunoadhesin comprising an extracellular or PD-1 binding portion of PD-L1 or PD-L2 fused to a constant region (e.g., an Fc region of an immunoglobulin sequence). In some embodiments, the PD-1 inhibitor is AMP-224 (B7-DCIg; Amplimmune; e.g., disclosed in WO2010/027827 and WO2011/066342), is a PD-L2 Fc fusion soluble receptor that blocks the interaction between PD-1 and B7-H1.

[0851] In one embodiment, the anti-PD-1 antibody or fragment thereof is an anti-PD-1 antibody molecule as described in US 2015/0210769, entitled “Antibody Molecules to PD-1 and Uses Thereof,” incorporated by reference in its entirety. In one embodiment, the anti-PD-1 antibody molecule includes at least one, two, three, four, five or six CDRs (or collectively all of the CDRs) from a heavy and light chain variable region from an antibody chosen from any of BAP049-hum01, BAP049-hum02, BAP049-hum03, BAP049-hum04, BAP049-hum05, BAP049-hum06, BAP049-hum07, BAP049-hum08, BAP049-hum09, BAP049-hum10, BAP049-hum11, BAP049-hum12, BAP049-hum13, BAP049-hum14, BAP049-hum15, BAP049-hum16, BAP049-Clone-A, BAP049-Clone-B, BAP049-Clone-C, BAP049-Clone-D, or BAP049-Clone-E; or as described in Table 1 of US 2015/0210769, or encoded by the nucleotide sequence in Table 1, or a sequence substantially identical (e.g., at least 80%, 85%, 90%, 92%, 95%, 97%, 98%, 99% or higher identical) to any of the aforesaid sequences; or closely related CDRs, e.g., CDRs which are identical or which have at least one amino acid alteration, but not more than two, three or four alterations (e.g., substitutions, deletions, or insertions, e.g., conservative substitutions).

[0852] In yet another embodiment, the anti-PD-1 antibody molecule comprises at least one, two, three or four variable regions from an antibody described herein, e.g., an antibody chosen from any of BAP049-hum01, BAP049-hum02, BAP049-hum03, BAP049-hum04, BAP049-hum05, BAP049-hum06, BAP049-hum07, BAP049-hum08, BAP049-hum09, BAP049-hum10, BAP049-hum11, BAP049-hum12, BAP049-hum13, BAP049-hum14, BAP049-hum15, BAP049-hum16, BAP049-Clone-A, BAP049-Clone-B, BAP049-Clone-C, BAP049-Clone-D, or BAP049-Clone-E; or as described in Table 1 of US 2015/0210769, or encoded by the nucleotide sequence in Table 1; or a sequence substantially identical (e.g., at least 80%, 85%, 90%, 92%, 95%, 97%, 98%, 99% or higher identical) to any of the aforesaid sequences.

### Therapeutic Application for Diseases and Disorders

[0853] Antigen, e.g., CD19, Associated Diseases and/or Disorders

[0854] The present disclosure provides compositions and methods for treating diseases and disorders (e.g., cancers), e.g., associated with the expression of an antigen, e.g., CD19. In one aspect, the invention provides methods for treating a disease wherein part of the cancer is negative for the antigen, e.g., CD19, and part of the cancer is positive for the antigen, e.g., CD19.

[0855] For example, the methods and compositions of the invention are useful for treating subjects that have relapsed or have a refractory disease (e.g., cancer, e.g., CD19+ cancer).

[0856] In certain embodiments, the subject has previously been administered a chemotherapy, e.g., a chemotherapy described herein (e.g., lymphodepleting chemotherapy, carboplatin, and/or gemcitabine), prior to administration with a CAR-expressing cell and/or a PD-1 inhibitor described herein. In embodiments, the subject has previously been administered an immunotherapy, e.g., an allogeneic bone marrow transplant, prior to administration with a CAR-expressing cell and/or a PD-1 inhibitor described herein. In embodiments, the subject has previously undergone radiation therapy prior to administration with a CAR-expressing cell and/or a PD-1 inhibitor described herein.

[0857] Exemplary cancers that can be treated with the combination therapy described herein (e.g., CAR-expressing cell and a PD-1 inhibitor) include a hematological cancer. Exemplary hematological cancers are described in greater detail below.

[0858] The disclosure includes (among other things) a type of cellular therapy where T cells are genetically modified to express a chimeric antigen receptor (CAR) and the CAR T cell is infused to a recipient in need thereof. The infused cell is able to kill tumor cells in the recipient. Unlike antibody therapies, CAR-modified T cells are able to replicate in vivo resulting in long-term persistence that can lead to sustained tumor control. In various aspects, the T cells administered to the patient, or their progeny, persist in the patient for at least four months, five months, six months, seven months, eight months, nine months, ten months, eleven months, twelve months, thirteen months, fourteen month, fifteen months, sixteen months, seventeen months, eighteen months, nineteen months, twenty months, twenty-one months, twenty-two months, twenty-three months, two years, three years, four years, or five years after administration of the T cell to the patient.

[0859] The invention also includes a type of cellular therapy where immune effector cells, e.g., NK cells or T cells are modified, e.g., by in vitro transcribed RNA, to transiently express a chimeric antigen receptor (CAR) and the CAR-expressing (e.g., CART) cell is infused to a recipient in need thereof. The infused cell is able to kill cancer cells in the recipient. Thus, in various aspects, the CAR-expressing cells, e.g., T cells, administered to the patient, is present for less than one month, e.g., three weeks, two weeks, one week, after administration of the CAR-expressing cell, e.g., T cell, to the patient.

[0860] Without wishing to be bound by any particular theory, the anti-cancer immunity response elicited by the CAR-modified T cells may be an active or a passive immune response, or alternatively may be due to a direct vs indirect immune response. In one aspect, the CAR (e.g., CD19-CAR) transduced T cells exhibit specific proinflammatory cytokine secretion and potent cytolytic activity in response to human cancer cells expressing the target antigen (e.g., CD19), resist soluble target antigen inhibition, mediate bystander killing and mediate regression of an established human cancer. For example, antigen-less cancer cells within a heterogeneous field of target antigen-expressing cancer may be susceptible to indirect destruction by target antigen-redirected T cells that has previously reacted against adjacent antigen-positive cancer cells.

[0861] In one aspect, the disclosure features a method of treating cancer in a subject. The method comprises administering to the subject a combination therapy that includes administering a CAR-expressing cell (e.g., CD19 CAR-expressing cell) and a PD-1 inhibitor such that the cancer is treated in the subject. An example of a cancer that is treatable by the combination therapy described herein is a cancer associated with expression of an antigen, e.g., CD19. In one aspect, the cancer associated with expression of an antigen, e.g., CD19, is selected from any of the hematological cancers described herein, e.g., a lymphoma, e.g., a follicular lymphoma or DLBCL.

[0862] In one embodiment, the combination therapy of a CAR-expressing cell (e.g., CD19 CAR-expressing cell) and a PD-1 inhibitor described herein results in one or more of: improved or increased anti-tumor activity of the CAR-expressing cell (e.g., CD19 CAR-expressing cell); increased proliferation or persistence of the CAR-expressing cell; improved or increased infiltration of the CAR-expressing cell; improved inhibition of tumor progression; delay of tumor progression; inhibition or reduction in cancer cell proliferation; and/or reduction in tumor burden, e.g., tumor volume, or size, e.g., as compared to a monotherapy of CAR-expressing cell or PD-1 inhibitor alone. In one embodiment, the combination therapy results in increased persistence of the CAR-expressing cell and a prolonged B cell recovery, e.g., manifested as a B cell aplasia. In one embodiment, the combination therapy results in increased persistence of the CAR-expressing cell and a lower, e.g., reduced, risk of relapse.

[0863] The present invention provides methods for inhibiting the proliferation of or reducing an antigen-expressing (e.g., CD19-expressing) cell population. In one embodiment, the methods comprise administering a combination therapy, e.g., a combination comprising a CAR-expressing cell (e.g., CD19 CAR-expressing cell), or a population of CAR expressing cells, and a PD-1 inhibitor. In certain embodiments, the combination therapy described herein reduces the quantity, number, amount or percentage of cells and/or cancer cells by at least at least 5% , 10%, at least 15%, at least 20%, at least 25%, at least 30%, at least 35%, at least 40%, at least 45%, at least 50%, at least 55%, at least 60%, at least 65%, at least 70%, at least 75%, at least 80%, at least 85%, at least 90%, at least 95%, or at least 99% in a subject with or animal model of an antigen (e.g., CD19) or another cancer associated with antigen-expressing (e.g., CD19-expressing) cells relative to the quantity, number, amount, or percentage of cells and/or cancer cells in a subject treated with a CAR-expressing (e.g., CD19 CAR-expressing) cell or a PD-1 inhibitor alone. In one embodiment, the subject is a human. In an embodiment, the subject is a monkey, e.g., cynomolgus monkey.

[0864] The invention also provides methods for preventing, treating and/or managing a disorder, e.g., a disorder associated with antigen-expressing cells (e.g., CD19-expressing cells) (e.g., a cancer described herein), the methods comprising administering to a subject in need a CAR-expressing cell (e.g., CD19 CAR-expressing cell), or a population of CAR-expressing cells, and a PD-1 inhibitor. In one aspect, the subject is a human.

[0865] In one aspect, the invention pertains to a method of inhibiting growth of a cancer cell, (e.g., an antigen-expressing, e.g., CD19-expressing, cancer cell), comprising contacting the cancer cell with a CAR-expressing (e.g., CD19 CAR expressing) cell, e.g., a CD19 CART cell, described herein, and one or more other CAR expressing cells, e.g., as described herein, such that the CART is activated in response to the antigen and targets the cancer cell, wherein the growth of the cancer is inhibited. The CAR-expressing cell, e.g., T cell, is administered in combination with a PD-1, e.g., a PD-1 described herein.

[0866] The present disclosure also provides methods for preventing, treating and/or managing a disease, e.g., a disease associated with antigen-expressing (e.g., CD19-expressing) cells (e.g., a hematologic cancer or atypical cancer expressing the antigen, e.g., CD19), the methods comprising administering to a subject in need an CAR-expressing (e.g., CD19 CAR-expressing) cell that binds to the antigen-expressing cell and administering a PD-1 inhibitor described herein. In one aspect, the subject is a human. Non-limiting examples of disorders associated with antigen (e.g., CD19)-expressing cells include autoimmune disorders (such as lupus), inflammatory disorders (such as allergies and asthma) and cancers (such as hematological cancers or atypical cancers expressing the antigen, e.g., CD19).

[0867] The present disclosure also provides methods for preventing, treating and/or managing a disease associated with antigen-expressing (e.g.,CD19-expressing) cells, the methods comprising administering to a subject in need a CART cell (e.g., an anti-CD19 CART cell) of the invention that binds to the antigen-expressing (e.g., CD19-expressing) cell. In one aspect, the subject is a human.

[0868] The present disclosure also provides methods for preventing relapse of cancer, e.g., associated with antigen-expressing (e.g., CD19-expressing) cells, the methods comprising administering to a subject in need thereof a CART cell (e.g., an anti-CD19 CART cell) of the invention that binds to the antigen-expressing (e.g., CD19-expressing) cell. In one aspect, the methods comprise administering to the subject in need thereof an effective amount of a CART cell (e.g., an anti-CD19 CART cell) described herein that binds to the antigen-expressing (e.g., CD19-expressing) cell in combination with an effective amount of another therapy, e.g., PD-1 inhibitor.

[0869] Non-cancer related indications, e.g., associated with expression of an antigen, e.g., CD19, include, but are not limited to, e.g., autoimmune disease, (e.g., lupus), inflammatory disorders (allergy and asthma) and transplantation.

[0870] The CAR-expressing cells described herein may be administered either alone, or as a pharmaceutical composition in combination with diluents and/or with other components such as IL-2 or other cytokines or cell populations.

[0871] In some embodiments, a CAR-expressing cell (e.g., CD19 CAR-expressing cell) described herein is used to deplete a B cell (e.g., a population of B cells, e.g., regulatory B cells). Without wishing to be bound by theory, it is believed that depletion of B cells, e.g., regulatory B cells, can improve the tumor microenvironment such that combination therapies (e.g., combination therapies described herein) can be more effective (e.g., than without depletion of the B cells). Thus, provided herein is a method for reducing, e.g., depleting, regulatory cells (e.g., regulatory B cells). The method includes administering a CAR-expressing cell (e.g., CD19 CAR-expressing cell) described herein in an amount sufficient to reduce the regulatory cells. In some embodiments, the methods can be used to modulate a tumor microenvironment, e.g., to enhance the effectiveness of a therapy described herein.

### Hematologic Cancers

[0872] Hematological cancer conditions are the types of cancer such as leukemia, lymphoma and malignant lymphoproliferative conditions that affect blood, bone marrow and the lymphatic system.

[0873] In one embodiment, the hematologic cancer is leukemia. In one embodiment, the cancer is selected from the group consisting of one or more acute leukemias including but not limited to B-cell acute lymphoid leukemia (BALL), T-cell acute lymphoid leukemia (TALL), small lymphocytic leukemia (SLL), acute lymphoid leukemia (ALL); one or more chronic leukemias including but not limited to chronic myelogenous leukemia (CML), chronic lymphocytic leukemia (CLL); additional hematologic cancers or hematologic conditions including, but not limited to mantle cell lymphoma (MCL), B cell prolymphocytic leukemia, blastic plasmacytoid dendritic cell neoplasm, Burkitt's lymphoma, diffuse large B cell lymphoma, follicular lymphoma, hairy cell leukemia, small cell- or a large cell-follicular lymphoma, malignant lymphoproliferative conditions, MALT lymphoma, Marginal zone lymphoma, multiple myeloma, myelodysplasia and myelodysplastic syndrome, non-Hodgkin lymphoma, Hodgkin lymphoma, plasmablastic lymphoma, plasmacytoid dendritic cell neoplasm, Waldenstrom macroglobulinemia, and “preleukemia” which are a diverse collection of hematological conditions united by ineffective production (or dysplasia) of myeloid blood cells. Diseases associated with an antigen, e.g., CD19, expression include, but not limited to atypical and/or non-classical cancers, malignancies, precancerous conditions or proliferative diseases expressing the antigen, e.g., CD19; and any combination thereof.

[0874] Leukemia can be classified as acute leukemia and chronic leukemia. Acute leukemia can be further classified as acute myelogenous leukemia (AML) and acute lymphoid leukemia (ALL). Chronic leukemia includes chronic myelogenous leukemia (CML) and chronic lymphoid leukemia (CLL). Other related conditions include myelodysplastic syndromes (MDS, formerly known as “preleukemia”) which are a diverse collection of hematological conditions united by ineffective production (or dysplasia) of myeloid blood cells and risk of transformation to AML.

[0875] Lymphoma is a group of blood cell tumors that develop from lymphocytes. Exemplary lymphomas include non-Hodgkin lymphoma and Hodgkin lymphoma.

[0876] In an aspect, the invention pertains to a method of treating a mammal having Hodgkin lymphoma, comprising administering to the mammal an effective amount of the cells expressing CAR molecule, e.g., a CD19 CAR molecule, e.g., a CD19 CAR molecule described herein and a B-cell inhibitor.

[0877] In one aspect, the compositions and CART cells or CAR expressing NK cells of the present invention are particularly useful for treating B cell malignancies, such as non-Hodgkin lymphomas, e.g., DLBCL, Follicular lymphoma, or CLL.

[0878] Non-Hodgkin lymphoma (NHL) is a group of cancers of lymphocytes, formed from either B or T cells. NHLs occur at any age and are often characterized by lymph nodes that are larger than normal, weight loss, and fever. Different types of NHLs are categorized as aggressive (fast-growing) and indolent (slow-growing) types. B-cell non-Hodgkin lymphomas include Burkitt lymphoma, chronic lymphocytic leukemia/small lymphocytic lymphoma (CLL/SLL), diffuse large B-cell lymphoma (DLBCL), follicular lymphoma, immunoblastic large cell lymphoma, precursor B-lymphoblastic lymphoma, and mantle cell lymphoma. Examples of T-cell non-Hodgkin lymphomas include mycosis fungoides, anaplastic large cell lymphoma, and precursor T-lymphoblastic lymphoma. Lymphomas that occur after bone marrow or stem cell transplantation are typically B-cell non-Hodgkin lymphomas. See, e.g., Maloney. NEJM. 366.21(2012):2008-16. In some embodiments, non-Hodgkin lymphomas, e.g., DLBCL, Follicular lymphoma, or CLL, can have high expression of PD-L1, which can be linked to poor clinical outcomes.

[0879] Diffuse large B-cell lymphoma (DLBCL) is a form of NHL that develops from B cells. DLBCL is an aggressive lymphoma that can arise in lymph nodes or outside of the lymphatic system, e.g., in the gastrointestinal tract, testes, thyroid, skin, breast, bone, or brain. Three variants of cellular morphology are commonly observed in DLBCL: centroblastic, immunoblastic, and anaplastic. Centroblastic morphology is most common and has the appearance of medium-to-large-sized lymphocytes with minimal cytoplasm. There are several subtypes of DLBCL. For example, primary central nervous system lymphoma is a type of DLBCL that only affects the brain is called and is treated differently than DLBCL that affects areas outside of the brain. Another type of DLBCL is primary mediastinal B-cell lymphoma, which often occurs in younger patients and grows rapidly in the chest. Symptoms of DLBCL include a painless rapid swelling in the neck, armpit, or groin, which is caused by enlarged lymph nodes. For some subjects, the swelling may be painful. Other symptoms of DLBCL include night sweats, unexplained fevers, and weight loss. Although most patients with DLBCL are adults, this disease sometimes occurs in children.

[0880] In some embodiments, subsets of DLBCL patients show PD-L1 and/or PD-L2 locus alterations. For example, alterations of PD-L1 and PD-L2 loci was observed in 19% patients, with 12% patients showing copy number gains, 3% presenting amplifications and 4% showing translocations. In some embodiments, PD-L1 expression can be detected by immunohistochemistry (IHC) in samples from patients, including those with translocationr or amplifications of the PD-L1 and PD-L2 loci.

[0881] Genetic alterations can also be present in the non-GCB (Germinal center B-cell) subtype of DLBCL. In some embodiments, PD-L1 expression can be seen in non-GCB DLBCL patients. In some embodiments, non-GCB DLBCL patients resemble classical Hodgkin's lymphoma (cHL) in terms of PD-L1/PD-L2 expression or genetic alterations.

[0882] Treatment for DLBCL includes chemotherapy (e.g., cyclophosphamide, doxorubicin, vincristine, prednisone, etoposide),anti-neoplastic drugs (e.g., Pixantrone), antibodies (e.g., Rituxan), anthracycline-containing regimens, radiation, or stem cell transplants, e.g., autologous stem cell transplant (ASCT) or allogeneic hematopoietic stem cell transplant (HSCT). In some embodiments, treatment for DLBCL can include combination therapies including but not limited to: R-CHOP (cyclophosphamide, doxorubicin, vincristine, prednisone/prednisolone, and rituximab); R-ICE (Rituximab, ifosfamide, carboplatin and etoposide); R-DHAP (Rituximab, dexamethasone, cytarabine and cisplatin); R-GDP (Rituximab, dexamethasone, gemcitabine and cisplatin); GemOX (gemcitabine and oxaliplatin); or HDCT (high dose chemotherapy) and ASCT.

[0883] These treatments, e.g., lines of therapy, for DLBCL can be administered as a first line therapy, a second line therapy, a third line therapy or a fourth line therapy. In some embodiments, treatment for DLBCL can include one or more lines of therapy, e.g., one, two, three, or four lines of therapy. In some embodiments, the treatments for DLBCL can inclue any one or more of the treatments disclosed herein, or combinations thereof.

[0884] In some embodiments, a first line therapy comprises R-CHOP, R-ICE, R-DHAP, R-GDP, GemOx, Rituximab, HDCT and ASCT, Pixantrone, allogeneic HSCT, CART therapy (e.g., CTL019, CTL119 or BCMA CAR) or an investigative agent. In some embodiments, the first line therapy is R-CHOP.

[0885] In some embodiments, a second line therapy comprises R-CHOP, R-ICE, R-DHAP, R-GDP, GemOx, Rituximab, HDCT and ASCT, Pixantrone, allogeneic HSCT, CART therapy (e.g., CTL019, CTL119 or BCMA CAR) or an investigative agent. In some embodiments, the second line therapy comprises R-ICE, R-DHAP, R-GDP, GemOx, Rituximab, HDCT and ASCT, or investigative agents. In some embodiments, the second line therapy is R-ICE, R-DHAP or R-GDP. In some embodiments, the second line theraoy is HDCT in combination with ASCT. In some embodiments, the second line therapy is Rituximab. In some embodiments, the second line therapy is GemOx. In some embodiments, the second line therapy is an investigative agent.

[0886] In some embodiments, a third line therapy comprises R-CHOP, R-ICE, R-DHAP, R-GDP, GemOx, Rituximab, HDCT and ASCT, Pixantrone, allogeneic HSCT, CART therapy (e.g., CTL019, CTL119 or BCMA CAR) or an investigative agent. In some embodiments, a third line therapy is Pixantrone. In some embodiments, a third line therapy is an investigative agent. In some embodiments, the third line therapy is a CART therapy (e.g., CTL019, CTL119 or BCMA CAR). In other embodiments, the third line therapy is allogeneic HSCT.

[0887] In some embodiments, a fourth line therapy comprises R-CHOP, R-ICE, R-DHAP, R-GDP, GemOx, Rituximab, HDCT and ASCT, Pixantrone, allogeneic HSCT, CART therapy (e.g., CTL019, CTL119 or BCMA CAR) or an investigative agent. In some embodiments, the fourth line therapy comprises an investigative agent.

[0888] About 60% of patients respond to a Rituximab containing first line of therapy. In some embodiments, patients who receive more than two lines of therapy, e.g., two, three, or four lines of therapy have a poor prognosis. Patients recvieing R-DHAP and O-DHAP as second line therapy have a median progression free survival (PFS) of 2.1 and 1.8 months respectively, and a median overall survival (OS) of 13.2 and 13.7 months, respectively. Patients failing salvage therapy or relapsing after autologous HSCT have a median OS of 4.4 months. The 1 year OS of these patients is 23% and the 2 year OS for these patients is 15.7%. Additionally, there is no standard of care for third line chemotherapy, or for patients who fail autologous transplant or are ineligible for it. Therefore, there is an unmet need in r/r DLBCL.

[0889] CART therapy can potentially be curative, but not for all r/r DLBCL patients. Although CART therapy offers improved outcomes over existing therapies, about two thirds of r/r DLBCL patients will not have a durable response to CART therapy. A combination of CART therapy and checkpoint inhibitors, e.g., anti-PD-1 antibody (e.g., Pembrolizumab), can improve the response in r/r DLBCL patients.

[0890] In some embodiments, a combination of a CART therapy (e.g., CTL019, CTL119 or BCMA CAR) with a checkpoint inhibitor, e.g., an anti-PD-1 antibody (e.g., Pembrolizumab), can be used as a third line therapy. In some embodiments, the combination therapy can result in durable response rates in, e.g., patients with r/r DLBCL. In some embodiments, the combination therapy can prolong the persistence of the CART therapy (e.g., CTL019, CTL119 or BCMA CAR) at the tumor site (e.g., in the blood, bone marrow, or spleen). In other embodiments, the combination therapy can be better than a CART monotherapy, e.g., a monotherapy of CTL019, CTL119 or BCMA CAR. In some embodiments, the combination therapy can enhance the duration of response upon recovery of normal T cell populations in the subject, e.g., following lymphodepletion. In other embodiments, the anti-PD-1 antibody (e.g., Pembrolizumab) can block PD-1 mediated inhibition of a spontaneous immune response. In some embodiments, the subject receiving the combination therapy has DLBCL, e.g., GCB or non-GCB DLBCL. In some embodiments, the subject with DLBCL, e.g., GCB or non-GCB DLBCL, can be selected for combination therapy based on PD-L1 expression or genetic alterations.

[0891] Follicular lymphoma a type of non-Hodgkin lymphoma and is a lymphoma of follicle center B-cells (centrocytes and centroblasts), which has at least a partially follicular pattern. Follicular lymphoma cells express the B-cell markers CD10, CD19, CD20, and CD22. Follicular lymphoma cells are commonly negative for CDS. Morphologically, a follicular lymphoma tumor is made up of follicles containing a mixture of centrocytes (also called cleaved follicle center cells or small cells) and centroblasts (also called large noncleaved follicle center cells or large cells). The follicles are surrounded by non-malignant cells, mostly T-cells. The follicles contain predominantly centrocytes with a minority of centroblasts.The World Health Organization (WHO) morphologically grades the disease as follows: grade 1 (<5 centroblasts per high-power field (hpf); grade 2 (6-15 centroblasts/hpf); grade 3 (>15 centroblasts/hpf). Grade 3 is further subdivided into the following grades: grade 3A (centrocytes still present); grade 3B (the follicles consist almost entirely of centroblasts).

[0892] Treatment of follicular lymphoma includes chemotherapy, e.g., alkyating agents, nucleoside analogs, anthracycline-containing regimens, e.g., a combination therapy called CHOP—cyclophosphamide, doxorubicin, vincristine, prednisone/prednisolone, antibodies (e.g., rituximab), radioimmunotherapy, and hematopoietic stem cell transplantation.

[0893] CLL is a B-cell malignancy characterized by neoplastic cell proliferation and accumulation in bone morrow, blood, lymph nodes, and the spleen. The median age at time of diagnosis of CLL is about 65 years. Current treatments include chemotherapy, radiation therapy, biological therapy, or bone marrow transplantation. Sometimes symptoms are treated surgically (e.g., splenectomy removal of enlarged spleen) or by radiation therapy (e.g., de-bulking swollen lymph nodes). Chemotherapeutic agents to treat CLL include, e.g., fludarabine, 2-chlorodeoxyadenosine (cladribine), chlorambucil, vincristine, pentostatin, cyclophosphamide, alemtuzumab (Campath-1H), doxorubicin, and prednisone. Biological therapy for CLL includes antibodies, e.g., alemtuzumab, rituximab, and ofatumumab; as well as tyrosine kinase inhibitor therapies. A number of criteria can be used to classify stage of CLL, e.g., the Rai or Binet system. The Rai system describes CLL has having five stages: stage 0 where only lymphocytosis is present; stage I where lymphadenopathy is present; stage II where splenomegaly, lymphadenopathy, or both are present; stage III where anemia, organomegaly, or both are present (progression is defined by weight loss, fatigue, fever, massive organomegaly, and a rapidly increasing lymphocyte count); and stage IV where anemia, thrombocytopenia, organomegaly, or a combination thereof are present. Under the Binet staging system, there are three categories: stage A where lymphocytosis is present and less than three lymph nodes are enlarged (this stage is inclusive of all Rai stage 0 patients, one-half of Rai stage I patients, and one-third of Rai stage II patients); stage B where three or more lymph nodes are involved; and stage C wherein anemia or thrombocytopenia, or both are present. These classification systems can be combined with measurements of mutation of the immunoglobulin genes to provide a more accurate characterization of the state of the disease. The presence of mutated immunoglobulin genes correlates to improved prognosis.

[0894] In another embodiment, the CAR expressing cells of the present invention are used to treat cancers or leukemias, e.g., with leukemia stem cells. For example, the leukemia stem cells are CD34⁺/CD38⁻ leukemia cells.

### Combination Therapies

[0895] Any of the methods described herein may be used in combination with other known agents and therapies.

[0896] The combination described herein, e.g., a CAR-expressing cell (e.g., CD19 CAR-expressing cell) and a PD-1 inhibitor, and the at least one additional therapeutic agent can be administered simultaneously, in the same or in separate compositions, or sequentially. For sequential administration, the CAR-expressing cell and/or the PD-1 inhibitor described herein can be administered after the additional therapeutic agent, or the order of administration can be reversed where the additional therapeutic agent can be administered after the CAR-expressing cell and/or the PD-1 inhibitor described herein. Alternatively, the additional therapeutic agent can be administered between administration of the CAR-expressing cell and the PD-1 inhibitor.

[0897] In further aspects, the combination described herein, e.g., a CAR-expressing cell (e.g., CD19 CAR-expressing cell) and a PD-1 inhibitor, may be used in a treatment regimen in combination with surgery, chemotherapy, radiation, immunosuppressive agents, such as cyclosporin, azathioprine, methotrexate, mycophenolate, and FK506, antibodies, or other immunoablative agents such as CAMPATH, anti-CD3 antibodies or other antibody therapies, cytoxin, fludarabine, cyclosporin, FK506, rapamycin, mycophenolic acid, steroids, FR901228, cytokines, and irradiation. peptide vaccine, such as that described in Izumoto et al. 2008 J Neurosurg 108:963-971.

[0898] In one embodiment, the combination described herein, e.g., a CAR-expressing cell (e.g., CD19 CAR-expressing cell) and a PD-1 inhibitor, can be used in combination with a chemotherapeutic agent. Exemplary chemotherapeutic agents include an anthracycline (e.g., doxorubicin (e.g., liposomal doxorubicin)). a vinca alkaloid (e.g., vinblastine, vincristine, vindesine, vinorelbine), an alkylating agent (e.g., cyclophosphamide, decarbazine, melphalan, ifosfamide, temozolomide), an immune cell antibody (e.g., alemtuzamab, gemtuzumab, rituximab, tositumomab), an antimetabolite (including, e.g., folic acid antagonists, pyrimidine analogs, purine analogs and adenosine deaminase inhibitors (e.g., fludarabine)), an mTOR inhibitor, a TNFR glucocorticoid induced TNFR related protein (GITR) agonist, a proteasome inhibitor (e.g., aclacinomycin A, gliotoxin or bortezomib), an immunomodulator such as thalidomide or a thalidomide derivative (e.g., lenalidomide).

[0899] General Chemotherapeutic agents are disclosed on pages 268-269 of International Application WO 2016/164731, filed Apr. 8, 2016, which is incorporated by reference in its entirety.

[0900] Exemplary alkylating agents are disclosed on pages 270-271 of International Application WO 2016/164731, filed Apr. 8, 2016, which is incorporated by reference in its entirety.

[0901] Exemplary mTOR inhibitors include, e.g., temsirolimus; ridaforolimus (formally known as deferolimus, (1R,2R,4S)-4-[(2R)-2 [(1R,9S,12S,15R,16E,18R,19R,21R, 23S,24E,26E,28Z,30S,32S,35R)-1,18-dihydroxy-19,30-dimethoxy-15,17,21,23, 29,35-hexamethyl-2,3,10,14,20-pentaoxo-11,36-dioxa-4-azatricyclo[30.3.1.0^{4.9}] hexatriaconta-16,24,26,28-tetraen-12-yl]propyl]-2-methoxycyclohexyl dimethylphosphinate, also known as AP23573 and MK8669, and described in PCT Publication No. WO 03/064383); everolimus (Afinitor® or RAD001); rapamycin (AY22989, Sirolimus®); simapimod (CAS 164301-51-3); emsirolimus, (5-{2,4-Bis[(3S)-3-methylmorpholin-4-yl]pyrido[2,3-d]pyrimidin-7-yl}-2-methoxyphenyl)methanol (AZD8055); 2-Amino-8-[trans-4-(2-hydroxyethoxy)cyclohexyl]-6-(6-methoxy-3-pyridinyl)-4-methyl-pyrido[2,3-d]pyrimidin-7(8H)-one (PF04691502, CAS 1013101-36-4); and N²-[1,4-dioxo-4-[[4-(4-oxo-8-phenyl-4H-1-benzopyran-2-yl)morpholinium-4-yl]methoxy]butyl]-L-arginylglycyl-L-α-aspartylL-serine-, inner salt (SEQ ID NO: 526) (SF1126, CAS 936487-67-1), and XL765.

[0902] Exemplary immunomodulators include, e.g., afutuzumab (available from Roche®); pegfilgrastim (Neulasta®); lenalidomide (CC-5013, Revlimid®); thalidomide (Thalomid®), actimid (CC4047); and IRX-2 (mixture of human cytokines including interleukin 1, interleukin 2, and interferon γ, CAS 951209-71-5, available from IRX Therapeutics).

[0903] Exemplary anthracyclines include, e.g., doxorubicin (Adriamycin® and Rubex®); bleomycin (lenoxane®); daunorubicin (dauorubicin hydrochloride, daunomycin, and rubidomycin hydrochloride, Cerubidine®); daunorubicin liposomal (daunorubicin citrate liposome, DaunoXome®); mitoxantrone (DHAD, Novantrone®); epirubicin (Ellence™); idarubicin (Idamycin®, Idamycin PFS®); mitomycin C (Mutamycin®); geldanamycin; herbimycin; ravidomycin; and desacetylravidomycin.

[0904] Exemplary vinca alkaloids include, e.g., vinorelbine tartrate (Navelbine®), Vincristine (Oncovin®), and Vindesine (Eldisine®)); vinblastine (also known as vinblastine sulfate, vincaleukoblastine and VLB, Alkaban-AQ® and Velban®); and vinorelbine (Navelbine®).

[0905] Exemplary proteosome inhibitors include bortezomib (Velcade®); carfilzomib (PX-171-007, (S)-4-Methyl-N-((S)-1-(((S)-4-methyl-1-((R)-2-methyloxiran-2-yl)-1-oxopentan-2-yl)amino)-1-oxo-3-phenylpropan-2-yl)-2-((S)-2-(2-morpholinoacetamido)-4-phenylbutanamido)-pentanamide); marizomib (NPI-0052); ixazomib citrate (MLN-9708); delanzomib (CEP-18770); and O-Methyl-N-[(2-methyl-5-thiazolyl)carbonyl]-L-seryl-O-methyl-N-[(1S)-2-[(2R)-2-methyl-2-oxiranyl]-2-oxo-1-(phenylmethyl)ethyl]-L-serinamide (ONX-0912).

[0906] In embodiments, the combination described herein, e.g., a CAR-expressing cell (e.g., CD19 CAR-expressing cell) and a PD-1 inhibitor, is administered to a subject in combination with brentuximab. Brentuximab is an antibody-drug conjugate of anti-CD30 antibody and monomethyl auristatin E. In embodiments, the subject has Hodgkin's lymphoma (HL), e.g., relapsed or refractory HL. In embodiments, the subject comprises CD30+ HL. In embodiments, the subject has undergone an autologous stem cell transplant (ASCT). In embodiments, the subject has not undergone an ASCT. In embodiments, brentuximab is administered at a dosage of about 1-3 mg/kg (e.g., about 1-1.5, 1.5-2, 2-2.5, or 2.5-3 mg/kg), e.g., intravenously, e.g., every 3 weeks.

[0907] In embodiments, the combination described herein, e.g., a CAR-expressing cell (e.g., CD19 CAR-expressing cell) and a PD-1 inhibitor, is administered to a subject in combination with brentuximab and dacarbazine or in combination with brentuximab and bendamustine. Dacarbazine is an alkylating agent with a chemical name of 5-(3,3-Dimethyl-1-triazenyl)imidazole-4-carboxamide. Bendamustine is an alkylating agent with a chemical name of 4-[5-[Bis(2-chloroethyl)amino]-1-methylbenzimidazol-2-yl]butanoic acid. In embodiments, the subject has Hodgkin's lymphoma (HL). In embodiments, the subject has not previously been treated with a cancer therapy. In embodiments, the subject is at least 60 years of age, e.g., 60, 65, 70, 75, 80, 85, or older. In embodiments, dacarbazine is administered at a dosage of about 300-450 mg/m² (e.g., about 300-325, 325-350, 350-375, 375-400, 400-425, or 425-450 mg/m²), e.g., intravenously. In embodiments, bendamustine is administered at a dosage of about 75-125 mg/m2 (e.g., 75-100 or 100-125 mg/m², e.g., about 90 mg/m²), e.g., intravenously. In embodiments, brentuximab is administered at a dosage of about 1-3 mg/kg (e.g., about 1-1.5, 1.5-2, 2-2.5, or 2.5-3 mg/kg), e.g., intravenously, e.g., every 3 weeks.

[0908] In some embodiments, a CAR-expressing cell described herein is administered to a subject in combination with a CD20 inhibitor, e.g., an anti-CD20 antibody (e.g., an anti-CD20 mono- or bispecific antibody) or a fragment thereof. Exemplary anti-CD20 antibodies include but are not limited to rituximab, ofatumumab, ocrelizumab, veltuzumab, obinutuzumab, TRU-015 (Trubion Pharmaceuticals), ocaratuzumab, and Pro131921 (Genentech). See, e.g., Lim et al. Haematologica. 95.1(2010):135-43.

[0909] In some embodiments, the anti-CD20 antibody comprises rituximab. Rituximab is a chimeric mouse/human monoclonal antibody IgG1 kappa that binds to CD20 and causes cytolysis of a CD20 expressing cell, e.g., as described in www.accessdata.fda.gov/drugsatfda_docs/label/2010/103705s5311lbl.pdf. In embodiments, a CAR-expressing cell described herein is administered to a subject in combination with rituximab. In embodiments, the subject has CLL or SLL.

[0910] In some embodiments, rituximab is administered intravenously, e.g., as an intravenous infusion. For example, each infusion provides about 500-2000 mg (e.g., about 500-550, 550-600, 600-650, 650-700, 700-750, 750-800, 800-850, 850-900, 900-950, 950-1000, 1000-1100, 1100-1200, 1200-1300, 1300-1400, 1400-1500, 1500-1600, 1600-1700, 1700-1800, 1800-1900, or 1900-2000 mg) of rituximab. In some embodiments, rituximab is administered at a dose of 150 mg/m² to 750 mg/m², e.g., about 150-175 mg/m², 175-200 mg/m², 200-225 mg/m², 225-250 mg/m², 250-300 mg/m², 300-325 mg/m², 325-350 mg/m², 350-375 mg/m², 375-400 mg/m², 400-425 mg/m², 425-450 mg/m², 450-475 mg/m², 475-500 mg/m², 500-525 mg/m², 525-550 mg/m², 550-575 mg/m², 575-600 mg/m², 600-625 mg/m², 625-650 mg/m², 650-675 mg/m², or 675-700 mg/m², where m² indicates the body surface area of the subject. In some embodiments, rituximab is administered at a dosing interval of at least 4 days, e.g., 4, 7, 14, 21, 28, 35 days, or more. For example, rituximab is administered at a dosing interval of at least 0.5 weeks, e.g., 0.5, 1, 2, 3, 4, 5, 6, 7, 8 weeks, or more. In some embodiments, rituximab is administered at a dose and dosing interval described herein for a period of time, e.g., at least 2 weeks, e.g., at least 2, 3, 4, 5, 6, 7, 8, 9, 10, 11, 12, 13, 14, 15, 16, 17, 18, 19, 20 weeks, or greater. For example, rituximab is administered at a dose and dosing interval described herein for a total of at least 4 doses per treatment cycle (e.g., at least 4, 5, 6, 7, 8, 9, 10, 11, 12, 13, 14, 15, 16, or more doses per treatment cycle).

[0911] In some embodiments, the anti-CD20 antibody comprises ofatumumab. Ofatumumab is an anti-CD20 IgGiK human monoclonal antibody with a molecular weight of approximately 149 kDa. For example, ofatumumab is generated using transgenic mouse and hybridoma technology and is expressed and purified from a recombinant murine cell line (NSO). See, e.g., www.accessdata.fda.gov/drugsatfda_docs/label/2009/125326lbl.pdf; and Clinical Trial Identifier number NCT01363128, NCT01515176, NCT01626352, and NCT01397591. In embodiments, a CAR-expressing cell described herein is administered to a subject in combination with ofatumumab. In embodiments, the subject has CLL or SLL.

[0912] In some embodiments, ofatumumab is administered as an intravenous infusion. For example, each infusion provides about 150-3000 mg (e.g., about 150-200, 200-250, 250-300, 300-350, 350-400, 400-450, 450-500, 500-550, 550-600, 600-650, 650-700, 700-750, 750-800, 800-850, 850-900, 900-950, 950-1000, 1000-1200, 1200-1400, 1400-1600, 1600-1800, 1800-2000, 2000-2200, 2200-2400, 2400-2600, 2600-2800, or 2800-3000 mg) of ofatumumab. In embodiments, ofatumumab is administered at a starting dosage of about 300 mg, followed by 2000 mg, e.g., for about 11 doses, e.g., for 24 weeks. In some embodiments, ofatumumab is administered at a dosing interval of at least 4 days, e.g., 4, 7, 14, 21, 28, 35 days, or more. For example, ofatumumab is administered at a dosing interval of at least 1 week, e.g., 1, 2, 3, 4, 5, 6, 7, 8, 9, 10, 11, 12, 24, 26, 28, 20, 22, 24, 26, 28, 30 weeks, or more. In some embodiments, ofatumumab is administered at a dose and dosing interval described herein for a period of time, e.g., at least 1 week, e.g., 1, 2, 3, 4, 5, 6, 7, 8, 9, 10, 11, 12, 13, 14, 15, 16, 17, 18, 19, 20, 22, 24, 26, 28, 30, 40, 50, 60 weeks or greater, or 1, 2, 3, 4, 5, 6, 7, 8, 9, 10, 11, 12 months or greater, or 1, 2, 3, 4, 5 years or greater. For example, ofatumumab is administered at a dose and dosing interval described herein for a total of at least 2 doses per treatment cycle (e.g., at least 2, 3, 4, 5, 6, 7, 8, 9, 10, 11, 12, 13, 14, 15, 16, 18, 20, or more doses per treatment cycle).

[0913] In some cases, the anti-CD20 antibody comprises ocrelizumab. Ocrelizumab is a humanized anti-CD20 monoclonal antibody, e.g., as described in Clinical Trials Identifier Nos. NCT00077870, NCT01412333, NCT00779220, NCT00673920, NCT01194570, and Kappos et al. Lancet. 19.378(2011):1779-87.

[0914] In some cases, the anti-CD20 antibody comprises veltuzumab. Veltuzumab is a humanized monoclonal antibody against CD20. See, e.g., Clinical Trial Identifier No. NCT00547066, NCT00546793, NCT01101581, and Goldenberg et al. Leuk Lymphoma. 51(5)(2010):747-55.

[0915] In some cases, the anti-CD20 antibody comprises GA101. GA101 (also called obinutuzumab or RO5072759) is a humanized and glyco-engineered anti-CD20 monoclonal antibody. See, e.g., Robak. Curr. Opin. Investig. Drugs. 10.6(2009):588-96; Clinical Trial Identifier Numbers: NCT01995669, NCT01889797, NCT02229422, and NCT01414205; and www.accessdata.fda.gov/drugsatfda_docs/label/2013/125486s000lbl.pdf.

[0916] In some cases, the anti-CD20 antibody comprises AME-133v. AME-133v (also called LY2469298 or ocaratuzumab) is a humanized IgG1 monoclonal antibody against CD20 with increased affinity for the FcγRIIIa receptor and an enhanced antibody dependent cellular cytotoxicity (ADCC) activity compared with rituximab. See, e.g., Robak et al. BioDrugs 25.1(2011):13-25; and Forero-Torres et al. Clin Cancer Res. 18.5(2012):1395-403.

[0917] In some cases, the anti-CD20 antibody comprises PRO131921. PRO131921 is a humanized anti-CD20 monoclonal antibody engineered to have better binding to FcγRIIIa and enhanced ADCC compared with rituximab. See, e.g., Robak et al. BioDrugs 25.1(2011):13-25; and Casulo et al. Clin Immunol. 154.1(2014):37-46; and Clinical Trial Identifier No. NCT00452127.

[0918] In some cases, the anti-CD20 antibody comprises TRU-015. TRU-015 is an anti-CD20 fusion protein derived from domains of an antibody against CD20. TRU-015 is smaller than monoclonal antibodies, but retains Fc-mediated effector functions. See, e.g., Robak et al. BioDrugs 25.1(2011):13-25. TRU-015 contains an anti-CD20 single-chain variable fragment (scFv) linked to human IgG1 hinge, CH2, and CH3 domains but lacks CH1 and CL domains.

[0919] In some embodiments, an anti-CD20 antibody described herein is conjugated or otherwise bound to a therapeutic agent, e.g., a chemotherapeutic agent (e.g., cytoxan, fludarabine, histone deacetylase inhibitor, demethylating agent, peptide vaccine, anti-tumor antibiotic, tyrosine kinase inhibitor, alkylating agent, anti-microtubule or anti-mitotic agent), anti-allergic agent, anti-nausea agent (or anti-emetic), pain reliever, or cytoprotective agent described herein.

[0920] In embodiments, a CAR-expressing cell described herein is administered to a subject in combination with a B-cell lymphoma 2 (BCL-2) inhibitor (e.g., venetoclax, also called ABT-199 or GDC-0199; ) and/or rituximab. In embodiments, a CAR-expressing cell described herein is administered to a subject in combination with venetoclax and rituximab. Venetoclax is a small molecule that inhibits the anti-apoptotic protein, BCL-2. Venetoclax has the chemical name: (4-(4-{[2-(4-chlorophenyl)-4,4-dimethylcyclohex-1-en-1-yl]methyl }piperazin-1-yl)-N-({3-nitro-4-[(tetrahydro-2H-pyran-4-ylmethyl)amino]phenyl}sulfonyl)-2-(1H-pyrrolo[2,3-b]pyridin-5-yloxy)benzamide).

[0921] In embodiments, the subject has CLL. In embodiments, the subject has relapsed CLL, e.g., the subject has previously been administered a cancer therapy. In embodiments, venetoclax is administered at a dosage of about 15-600 mg (e.g., 15-20, 20-50, 50-75, 75-100, 100-200, 200-300, 300-400, 400-500, or 500-600 mg), e.g., daily. In embodiments, rituximab is administered at a dosage of about 350-550 mg/m2 (e.g., 350-375, 375-400, 400-425, 425-450, 450-475, or 475-500 mg/m2), e.g., intravenously, e.g., monthly.

[0922] In some embodiments, the combination described herein, e.g., a CAR-expressing cell (e.g., CD19 CAR-expressing cell) and a PD-1 inhibitor, is administered in combination with an oncolytic virus. In embodiments, oncolytic viruses are capable of selectively replicating in and triggering the death of or slowing the growth of a cancer cell. In some cases, oncolytic viruses have no effect or a minimal effect on non-cancer cells. An oncolytic virus includes but is not limited to an oncolytic adenovirus, oncolytic Herpes Simplex Viruses, oncolytic retrovirus, oncolytic parvovirus, oncolytic vaccinia virus, oncolytic Sinbis virus, oncolytic influenza virus, or oncolytic RNA virus (e.g., oncolytic reovirus, oncolytic Newcastle Disease Virus (NDV), oncolytic measles virus, or oncolytic vesicular stomatitis virus (VSV)).

[0923] In some embodiments, the oncolytic virus is a virus, e.g., recombinant oncolytic virus, described in US2010/0178684 A1, which is incorporated herein by reference in its entirety. In some embodiments, a recombinant oncolytic virus comprises a nucleic acid sequence (e.g., heterologous nucleic acid sequence) encoding an inhibitor of an immune or inflammatory response, e.g., as described in US2010/0178684 A1, incorporated herein by reference in its entirety. In embodiments, the recombinant oncolytic virus, e.g., oncolytic NDV, comprises a pro-apoptotic protein (e.g., apoptin), a cytokine (e.g., GM-CSF, interferon-gamma, interleukin-2 (IL-2), tumor necrosis factor-alpha), an immunoglobulin (e.g., an antibody against ED-B firbonectin), tumor associated antigen, a bispecific adapter protein (e.g., bispecific antibody or antibody fragment directed against NDV HN protein and a T cell co-stimulatory receptor, such as CD3 or CD28; or fusion protein between human IL-2 and single chain antibody directed against NDV HN protein). See, e.g., Zamarin et al. Future Microbiol. 7.3(2012):347-67, incorporated herein by reference in its entirety. In some embodiments, the oncolytic virus is a chimeric oncolytic NDV described in U.S. Pat. No. 8,591,881 B2, US 2012/0122185 A1, or US 2014/0271677 A1, each of which is incorporated herein by reference in their entireties.

[0924] In some embodiments, the oncolytic virus comprises a conditionally replicative adenovirus (CRAd), which is designed to replicate exclusively in cancer cells. See, e.g., Alemany et al. Nature Biotechnol. 18(2000):723-27. In some embodiments, an oncolytic adenovirus comprises one described in Table 1 on page 725 of Alemany et al., incorporated herein by reference in its entirety.

[0925] Exemplary oncolytic viruses include but are not limited to the following: Group B Oncolytic Adenovirus (ColoAd1) (PsiOxus Therapeutics Ltd.) (see, e.g., Clinical Trial Identifier: NCT02053220); ONCOS-102 (previously called CGTG-102), which is an adenovirus comprising granulocyte-macrophage colony stimulating factor (GM-CSF) (Oncos Therapeutics) (see, e.g., Clinical Trial Identifier: NCT01598129); VCN-01, which is a genetically modified oncolytic human adenovirus encoding human PH20 hyaluronidase (VCN Biosciences, S.L.) (see, e.g., Clinical Trial Identifiers: NCT02045602 and NCT02045589); Conditionally Replicative Adenovirus ICOVIR-5, which is a virus derived from wild-type human adenovirus serotype 5 (Had5) that has been modified to selectively replicate in cancer cells with a deregulated retinoblastoma/E2F pathway (Institut Català d'Oncologia) (see, e.g., Clinical Trial Identifier: NCT01864759); Celyvir, which comprises bone marrow-derived autologous mesenchymal stem cells (MSCs) infected with ICOVIR5, an oncolytic adenovirus (Hospital Infantil Universitario Niño Jesús, Madrid, Spain/Ramon Alemany) (see, e.g., Clinical Trial Identifier: NCT01844661); CG0070, which is a conditionally replicating oncolytic serotype 5 adenovirus (Ad5) in which human E2F-1 promoter drives expression of the essential E1a viral genes, thereby restricting viral replication and cytotoxicity to Rb pathway-defective tumor cells (Cold Genesys, Inc.) (see, e.g., Clinical Trial Identifier: NCT02143804); orDNX-2401 (formerly named Delta-24-RGD), which is an adenovirus that has been engineered to replicate selectively in retinoblastoma (Rb)-pathway deficient cells and to infect cells that express certain RGD-binding integrins more efficiently (Clinica Universidad de Navarra, Universidad de Navarra/DNAtrix, Inc.) (see, e.g., Clinical Trial Identifier: NCT01956734).

[0926] In some embodiments, an oncolytic virus described herein is administering by injection, e.g., subcutaneous, intra-arterial, intravenous, intramuscular, intrathecal, or intraperitoneal injection. In embodiments, an oncolytic virus described herein is administered intratumorally, transdermally, transmucosally, orally, intranasally, or via pulmonary administration. In an embodiment, cells expressing a CAR described herein are administered to a subject in combination with a molecule that decreases the Treg cell population. Methods that decrease the number of (e.g., deplete) Treg cells are known in the art and include, e.g., CD25 depletion, cyclophosphamide administration, modulating GITR function. Without wishing to be bound by theory, it is believed that reducing the number of Treg cells in a subject prior to apheresis or prior to administration of a CAR-expressing cell described herein reduces the number of unwanted immune cells (e.g., Tregs) in the tumor microenvironment and reduces the subject's risk of relapse.

[0927] In one embodiment, the combination described herein, e.g., a CAR-expressing cell (e.g., CD19 CAR-expressing cell) and a PD-1 inhibitor, is administered to a subject in combination with a molecule targeting GITR and/or modulating GITR functions, such as a GITR agonist and/or a GITR antibody that depletes regulatory T cells (Tregs). In one embodiment, the GITR binding molecules and/or molecules modulating GITR functions (e.g., GITR agonist and/or Treg depleting GITR antibodies) are administered prior to the CAR-expressing cell. For example, in one embodiment, the GITR agonist can be administered prior to apheresis of the cells. In one embodiment, the subject has CLL. Exemplary GITR agonists include, e.g., GITR fusion proteins and anti-GITR antibodies (e.g., bivalent anti-GITR antibodies) such as, e.g., a GITR fusion protein described in U.S. Pat. No. 6,111,090, European Patent No.: 090505B1, U.S. Pat. No. 8,586,023, PCT Publication Nos.: WO 2010/003118 and 2011/090754, or an anti-GITR antibody described, e.g., in U.S. Pat. No. 7,025,962, European Patent No.: 1947183B1, U.S. Pat. No. 7,812,135, U.S. Pat. No. 8,388,967, U.S. Pat. No. 8,591,886, European Patent No.: EP 1866339, PCT Publication No.: WO 2011/028683, PCT Publication No.:WO 2013/039954, PCT Publication No.: WO2005/007190, PCT Publication No.: WO 2007/133822, PCT Publication No.: WO2005/055808, PCT Publication No.: WO 99/40196, PCT Publication No.: WO 2001/03720, PCT Publication No.: WO99/20758, PCT Publication No.: WO2006/083289, PCT Publication No.: WO 2005/115451, U.S. Patent No.: 7,618,632, and PCT Publication No.: WO 2011/051726.

[0928] In one embodiment, the combination described herein, e.g., a CAR-expressing cell (e.g., CD19 CAR-expressing cell) and a PD-1 inhibitor, is administered to a subject in combination with an mTOR inhibitor, e.g., an mTOR inhibitor described herein, e.g., a rapalog such as everolimus. In one embodiment, the mTOR inhibitor is administered prior to the CAR-expressing cell. For example, in one embodiment, the mTOR inhibitor can be administered prior to apheresis of the cells. In one embodiment, the subject has CLL.

[0929] In one embodiment, the combination described herein, e.g., a CAR-expressing cell (e.g., CD19 CAR-expressing cell) and a PD-1 inhibitor, is administered to a subject in combination with a GITR agonist, e.g., a GITR agonist described herein. In one embodiment, the GITR agonist is administered prior to the CAR-expressing cell. For example, in one embodiment, the GITR agonist can be administered prior to apheresis of the cells. In one embodiment, the subject has CLL.

[0930] In one embodiment, the combination described herein, e.g., a CAR-expressing cell (e.g., CD19 CAR-expressing cell) and a PD-1 inhibitor, is administered to a subject in combination with a protein tyrosine phosphatase inhibitor, e.g., a protein tyrosine phosphatase inhibitor described herein. In one embodiment, the protein tyrosine phosphatase inhibitor is an SHP-1 inhibitor, e.g., an SHP-1 inhibitor described herein, such as, e.g., sodium stibogluconate. In one embodiment, the protein tyrosine phosphatase inhibitor is an SHP-2 inhibitor.

[0931] In one embodiment, a CAR-expressing cell described herein can be used in combination with a kinase inhibitor. In one embodiment, the kinase inhibitor is a CDK4 inhibitor, e.g., a CDK4 inhibitor described herein, e.g., a CDK4/6 inhibitor, such as, e.g., 6-Acetyl-8-cyclopentyl-5-methyl-2-(5-piperazin-1-yl-pyridin-2-ylamino)-8H-pyrido[2,3-d]pyrimidin-7-one, hydrochloride (also referred to as palbociclib or PD0332991). In one embodiment, the kinase inhibitor is a BTK inhibitor, e.g., a BTK inhibitor described herein, such as, e.g., ibrutinib. In one embodiment, the kinase inhibitor is an mTOR inhibitor, e.g., an mTOR inhibitor described herein, such as, e.g., rapamycin, a rapamycin analog, OSI-027. The mTOR inhibitor can be, e.g., an mTORC1 inhibitor and/or an mTORC2 inhibitor, e.g., an mTORC1 inhibitor and/or mTORC2 inhibitor described herein. In one embodiment, the kinase inhibitor is a MNK inhibitor, e.g., a MNK inhibitor described herein, such as, e.g., 4-amino-5-(4-fluoroanilino)-pyrazolo [3,4-d] pyrimidine. The MNK inhibitor can be, e.g., a MNK1a, MNK1b, MNK2a and/or MNK2b inhibitor. In one embodiment, the kinase inhibitor is a dual PI3K/mTOR inhibitor described herein, such as, e.g., PF-04695102.

[0932] In one embodiment, the kinase inhibitor is a CDK4 inhibitor selected from aloisine A; flavopiridol or HMR-1275, 2-(2-chlorophenyl)-5,7-dihydroxy-8-[(3S,4R)-3-hydroxy-1-methyl-4-piperidinyl]-4-chromenone; crizotinib (PF-02341066; 2-(2-Chlorophenyl)-5,7-dihydroxy-8-[(2R,3S)-2-(hydroxymethyl)-1-methyl-3-pyrrolidinyl]-4H-1-benzopyran-4-one, hydrochloride (P276-00); 1-methyl-5-[[2-[5-(trifluoromethyl)-1H-imidazol-2-yl]-4-pyridinyl]oxy]-N-[4-(trifluoromethyl)phenyl]-1H-benzimidazol-2-amine (RAF265); indisulam (E7070); roscovitine (CYC202); palbociclib (PD0332991); dinaciclib (SCH727965); N-[5-[[(5-tert-butyloxazol-2-yl)methyl]thio]thiazol-2-yl]piperidine-4-carboxamide (BMS 387032); 4-[[9-chloro-7-(2,6-difluorophenyl)-5H-pyrimido[5,4-d][2]benzazepin-2-yl]amino]-benzoic acid (MLN8054); 5-[3-(4,6-difluoro-1H-benzimidazol-2-yl)-1H-indazol-5-yl]-N-ethyl-4-methyl-3-pyridinemethanamine (AG-024322); 4-(2,6-dichlorobenzoylamino)-1H-pyrazole-3-carboxylic acid N-(piperidin-4-yl)amide (AT7519); 4-[2-methyl-1-(1-methylethyl)-1H-imidazol-5-yl]-N-[4-(methylsulfonyl)phenyl]-2-pyrimidinamine (AZD5438); and XL281 (BMS908662).

[0933] In one embodiment, the kinase inhibitor is a CDK4 inhibitor, e.g., palbociclib (PD0332991), and the palbociclib is administered at a dose of about 50 mg, 60 mg, 70 mg, 75 mg, 80 mg, 90 mg, 100 mg, 105 mg, 110 mg, 115 mg, 120 mg, 125 mg, 130 mg, 135 mg (e.g., 75 mg, 100 mg or 125 mg) daily for a period of time, e.g., daily for 14-21 days of a 28 day cycle, or daily for 7-12 days of a 21 day cycle. In one embodiment, 1, 2, 3, 4, 5, 6, 7, 8, 9, 10, 11, 12 or more cycles of palbociclib are administered.

[0934] In embodiments, the combination described herein, e.g., a CAR-expressing cell (e.g., CD19 CAR-expressing cell) and a PD-1 inhibitor, is administered to a subject in combination with a cyclin-dependent kinase (CDK) 4 or 6 inhibitor, e.g., a CDK4 inhibitor or a CDK6 inhibitor described herein. In embodiments, a CAR-expressing cell described herein is administered to a subject in combination with a CDK4/6 inhibitor (e.g., an inhibitor that targets both CDK4 and CDK6), e.g., a CDK4/6 inhibitor described herein. In an embodiment, the subject has MCL. MCL is an aggressive cancer that is poorly responsive to currently available therapies, i.e., essentially incurable. In many cases of MCL, cyclin D1 (a regulator of CDK4/6) is expressed (e.g., due to chromosomal translocation involving immunoglobulin and Cyclin D1 genes) in MCL cells. Thus, without being bound by theory, it is thought that MCL cells are highly sensitive to CDK4/6 inhibition with high specificity (i.e., minimal effect on normal immune cells). CDK4/6 inhibitors alone have had some efficacy in treating MCL, but have only achieved partial remission with a high relapse rate. An exemplary CDK4/6 inhibitor is LEE011 (also called ribociclib), the structure of which is shown below.

[chemical structure]

[0935] Without being bound by theory, it is believed that administration of a CAR-expressing cell described herein with a CDK4/6 inhibitor (e.g., LEE011 or other CDK4/6 inhibitor described herein) can achieve higher responsiveness, e.g., with higher remission rates and/or lower relapse rates, e.g., compared to a CDK4/6 inhibitor alone.

[0936] In one embodiment, the kinase inhibitor is a BTK inhibitor selected from ibrutinib (PCI-32765); GDC-0834; RN-486; CGI-560; CGI-1764; HM-71224; CC-292; ONO-4059; CNX-774; and LFM-A13. In a preferred embodiment, the BTK inhibitor does not reduce or inhibit the kinase activity of interleukin-2-inducible kinase (ITK), and is selected from GDC-0834; RN-486; CGI-560; CGI-1764; HM-71224; CC-292; ONO-4059; CNX-774; and LFM-A13.

[0937] In one embodiment, the kinase inhibitor is a BTK inhibitor, e.g., ibrutinib (PCI-32765). In embodiments, a CAR-expressing cell described herein is administered to a subject in combination with a BTK inhibitor (e.g., ibrutinib). In embodiments, a CAR-expressing cell described herein is administered to a subject in combination with ibrutinib (also called PCI-32765). Ibrutinib has the chemical name: (1-[(3R)-3-[4-Amino-3-(4-phenoxyphenyl)-1H-pyrazolo[3,4-d]pyrimidin-1-yl]piperidin-1-yl]prop-2-en-1-one).

[0938] In embodiments, the subject has CLL, mantle cell lymphoma (MCL), or small lymphocytic lymphoma (SLL). For example, the subject has a deletion in the short arm of chromosome 17 (del(17p), e.g., in a leukemic cell). In other examples, the subject does not have a del(17p). In embodiments, the subject has relapsed CLL or SLL, e.g., the subject has previously been administered a cancer therapy (e.g., previously been administered one, two, three, or four prior cancer therapies). In embodiments, the subject has refractory CLL or SLL. In other embodiments, the subject has follicular lymphoma, e.g., relapse or refractory follicular lymphoma. In some embodiments, ibrutinib is administered at a dosage of about 300-600 mg/day (e.g., about 300-350, 350-400, 400-450, 450-500, 500-550, or 550-600 mg/day, e.g., about 420 mg/day or about 560 mg/day), e.g., orally. In embodiments, the ibrutinib is administered at a dose of about 250 mg, 300 mg, 350 mg, 400 mg, 420 mg, 440 mg, 460 mg, 480 mg, 500 mg, 520 mg, 540 mg, 560 mg, 580 mg, 600 mg (e.g., 250 mg, 420 mg or 560 mg) daily for a period of time, e.g., daily for 21 day cycle cycle, or daily for 28 day cycle. In one embodiment, 1, 2, 3, 4, 5, 6, 7, 8, 9, 10, 11, 12 or more cycles of ibrutinib are administered.

[0939] In some embodiments, ibrutinib is administered in combination with rituximab. See, e.g., Burger et al. (2013) Ibrutinib In Combination With Rituximab (iR) Is Well Tolerated and Induces a High Rate Of Durable Remissions In Patients With High-Risk Chronic Lymphocytic Leukemia (CLL): New, Updated Results Of a Phase II Trial In 40 Patients, Abstract 675 presented at 55^{th} ASH Annual Meeting and Exposition, New Orleans, La. 7-10 December. Without being bound by theory, it is thought that the addition of ibrutinib enhances the T cell proliferative response and may shift T cells from a T-helper-2 (Th2) to T-helper-1 (Th1) phenotype. Th1 and Th2 are phenotypes of helper T cells, with Th1 versus Th2 directing different immune response pathways. A Th1 phenotype is associated with proinflammatory responses, e.g., for killing cells, such as intracellular pathogens/viruses or cancerous cells, or perpetuating autoimmune responses. A Th2 phenotype is associated with eosinophil accumulation and anti-inflammatory responses.

[0940] In some embodiments of the methods, uses, and compositions herein, the BTK inhibitor is a BTK inhibitor described in International Application WO/2015/079417, which is herein incorporated by reference in its entirety. For instance, in some embodiments, the BTK inhibitor is a compound of formula (I) or a pharmaceutically acceptable salt thereof;

[chemical structure]

[0941] wherein,

[0942] R1 is hydrogen, C1-C6 alkyl optionally substituted by hydroxy;

[0943] R2 is hydrogen or halogen;

[0944] R3 is hydrogen or halogen;

[0945] R4 is hydrogen;

[0946] R5 is hydrogen or halogen;

[0947] or R4 and R5 are attached to each other and stand for a bond, —CH2-, —CH2-CH2-, —CH═CH—, —CH═CH—CH2-; —CH2-CH═CH—; or —CH2-CH2-CH2-;

[0948] R6 and R7 stand independently from each other for H, C1-C6 alkyl optionally substituted by hydroxyl, C3-C6 cycloalkyl optionally substituted by halogen or hydroxy, or halogen;

[0949] R8, R9, R, R′, R10 and R11 independently from each other stand for H, or C1-C6 alkyl optionally substituted by C1-C6 alkoxy; or any two of R8, R9, R, R′, R10 and R11 together with the carbon atom to which they are bound may form a 3-6 membered saturated carbocyclic ring;

[0950] R12 is hydrogen or C1-C6 alkyl optionally substituted by halogen or C1-C6 alkoxy;

[0951] or R12 and any one of R8, R9, R, R′, R10 or R11 together with the atoms to which they are bound may form a 4, 5, 6 or 7 membered azacyclic ring, which ring may optionally be substituted by halogen, cyano, hydroxyl, C1-C6 alkyl or C1-C6 alkoxy;

[0952] n is0 or 1; and

[0953] R13 is C2-C6 alkenyl optionally substituted by C1-C6 alkyl, C1-C6 alkoxy or N,N-di-C1-C6 alkyl amino; C2-C6 alkynyl optionally substituted by C1-C6 alkyl or C1-C6 alkoxy; or C2-C6 alkylenyl oxide optionally substituted by C1-C6 alkyl.

[0954] In some embodiments, the BTK inhibitor of Formula I is chosen from: N-(3-(5-((1-Acryloylazetidin-3-yl)oxy)-6-aminopyrimidin-4-yl)-5-fluoro-2-methylphenyl)-4-cyclopropyl-2-fluorobenzamide; (E)-N-(3-(6-Amino-5-((1-(but-2-enoyl)azetidin-3-yl)oxy)pyrimidin-4-yl)-5-fluoro-2-methylphenyl)-4-cyclopropyl-2-fluorobenzamide; N-(3-(6-Amino-5-((1-propioloylazetidin-3-yl)oxy)pyrimidin-4-yl)-5-fluoro-2-methylphenyl)-4-cyclopropyl-2-fluorobenzamide; N-(3-(6-Amino-5-((1-(but-2-ynoyl)azetidin-3-yl)oxy)pyrimidin-4-yl)-5-fluoro-2-methylphenyl)-4-cyclopropyl-2-fluorobenzamide; N-(3-(5-((1-Acryloylpiperidin-4-yl)oxy)-6-aminopyrimidin-4-yl)-5-fluoro-2-methylphenyl)-4-cyclopropyl-2-fluorobenzamide; N-(3-(6-Amino-5-(2-(N-methylacrylamido)ethoxy)pyrimidin-4-yl)-5-fluoro-2-methylphenyl)-4-cyclopropyl-2-fluorobenzamide; (E)-N-(3-(6-Amino-5-(2-(N-methylbut-2-enamido)ethoxy)pyrimidin-4-yl)-5-fluoro-2-methylphenyl)-4-cyclopropyl-2-fluorobenzamide; N-(3-(6-Amino-5-(2-(N-methylpropiolamido)ethoxy)pyrimidin-4-yl)-5-fluoro-2-methylphenyl)-4-cyclopropyl-2-fluorobenzamide; (E)-N-(3-(6-Amino-5-(2-(4-methoxy-N-methylbut-2-enamido)ethoxy)pyrimidin-4-yl)-5-fluoro-2-methylphenyl)-4-cyclopropyl-2-fluorobenzamide; N-(3-(6-Amino-5-(2-(N-methylbut-2-ynamido)ethoxy)pyrimidin-4-yl)-5-fluoro-2-methylphenyl)-4-cyclopropyl-2-fluorobenzamide; N-(2-((4-Amino-6-(3-(4-cyclopropyl-2-fluorobenzamido)-5-fluoro-2-methylphenyl)pyrimidin-5-yl)oxy)ethyl)-N-methyloxirane-2-carboxamide; N-(2-((4-Amino-6-(3-(6-cyclopropyl-8-fluoro-1-oxoisoquinolin-2(1H)-yl)phenyl)pyrimidin-5-yl)oxy)ethyl)-N-methylacrylamide; N-(3-(5-(2-Acrylamidoethoxy)-6-aminopyrimidin-4-yl)-5-fluoro-2-methylphenyl)-4-cyclopropyl-2-fluorobenzamide; N-(3-(6-Amino-5-(2-(N-ethylacrylamido)ethoxy)pyrimidin-4-yl)-5-fluoro-2-methylphenyl)-4-cyclopropyl-2-fluorobenzamide; N-(3-(6-Amino-5-(2-(N-(2-fluoroethyl)acrylamido)ethoxy)pyrimidin-4-yl)-5-fluoro-2-methylphenyl)-4-cyclopropyl-2-fluorobenzamide; N-(3-(5-((1-Acrylamidocyclopropyl)methoxy)-6-aminopyrimidin-4-yl)-5-fluoro-2-methylphenyl)-4-cyclopropyl-2-fluorobenzamide; (S)-N-(3-(5-(2-Acrylamidopropoxy)-6-aminopyrimidin-4-yl)-5-fluoro-2-methylphenyl)-4-cyclopropyl-2-fluorobenzamide; (S)-N-(3-(6-Amino-5-(2-(but-2-ynamido)propoxy)pyrimidin-4-yl)-5-fluoro-2-methylphenyl)-4-cyclopropyl-2-fluorobenzamide; (S)-N-(3-(6-Amino-5-(2-(N-methylacrylamido)propoxy)pyrimidin-4-yl)-5-fluoro-2-methylphenyl)-4-cyclopropyl-2-fluorobenzamide; (S)-N-(3-(6-Amino-5-(2-(N-methylbut-2-ynamido)propoxy)pyrimidin-4-yl)-5-fluoro-2-methylphenyl)-4-cyclopropyl-2-fluorobenzamide; N-(3-(6-Amino-5-(3-(N-methylacrylamido)propoxy)pyrimidin-4-yl)-5-fluoro-2-methylphenyl)-4-cyclopropyl-2-fluorobenzamide; (S)-N-(3-(5-((1-Acryloylpyrrolidin-2-yl)methoxy)-6-aminopyrimidin-4-yl)-5-fluoro-2-methylphenyl)-4-cyclopropyl-2-fluorobenzamide; (S)-N-(3-(6-Amino-5-((1-(but-2-ynoyl)pyrrolidin-2-yl)methoxy)pyrimidin-4-yl)-5-fluoro-2-methylphenyl)-4-cyclopropyl-2-fluorobenzamide; (S)-2-(3-(5-((1-Acryloylpyrrolidin-2-yl)methoxy)-6-aminopyrimidin-4-yl)-5-fluoro-2-(hydroxymethyl)phenyl)-6-cyclopropyl-3,4-dihydroisoquinolin-1(2H)-one; N-(2-((4-Amino-6-(3-(6-cyclopropyl-1-oxo-3,4-dihydroisoquinolin-2(1H)-yl)-5-fluoro-2-(hydroxymethyl)phenyl)pyrimidin-5-yl)oxy)ethyl)-N-methylacrylamide; N-(3-(5-(((2S,4R)-1-Acryloyl-4-methoxypyrrolidin-2-yl)methoxy)-6-aminopyrimidin-4-yl)-5-fluoro-2-methylphenyl)-4-cyclopropyl-2-fluorobenzamide; N-(3-(6-Amino-5-(((2S,4R)-1-(but-2-ynoyl)-4-methoxypyrrolidin-2-yl)methoxy)pyrimidin-4-yl)-5-fluoro-2-methylphenyl)-4-cyclopropyl-2-fluorobenzamide; 2-(3-(5-(((2S,4R)-1-Acryloyl-4-methoxypyrrolidin-2-yl)methoxy)-6-aminopyrimidin-4-yl)-5-fluoro-2-(hydroxymethyl)phenyl)-6-cyclopropyl-3,4-dihydroisoquinolin-1(2H)-one; N-(3-(5-(((2S,4S)-1-Acryloyl-4-methoxypyrrolidin-2-yl)methoxy)-6-aminopyrimidin-4-yl)-5-fluoro-2-methylphenyl)-4-cyclopropyl-2-fluorobenzamide; N-(3-(6-Amino-5-(((2S,4S)-1-(but-2-ynoyl)-4-methoxypyrrolidin-2-yl)methoxy)pyrimidin-4-yl)-5-fluoro-2-methylphenyl)-4-cyclopropyl-2-fluorobenzamide; N-(3-(5-(((2S,4R)-1-Acryloyl-4-fluoropyrrolidin-2-yl)methoxy)-6-aminopyrimidin-4-yl)-5-fluoro-2-methylphenyl)-4-cyclopropyl-2-fluorobenzamide; N-(3-(6-Amino-5-(((2S,4R)-1-(but-2-ynoyl)-4-fluoropyrrolidin-2-yl)methoxy)pyrimidin-4-yl)-5-fluoro-2-methylphenyl)-4-cyclopropyl-2-fluorobenzamide; (S)-N-(3-(5-((1-Acryloylazetidin-2-yl)methoxy)-6-aminopyrimidin-4-yl)-5-fluoro-2-methylphenyl)-4-cyclopropyl-2-fluorobenzamide; (S)-N-(3-(6-Amino-5-((1-propioloylazetidin-2-yl)methoxy)pyrimidin-4-yl)-5-fluoro-2-methylphenyl)-4-cyclopropyl-2-fluorobenzamide; (S)-2-(3-(5-((1-Acryloylazetidin-2-yl)methoxy)-6-aminopyrimidin-4-yl)-5-fluoro-2-(hydroxymethyl)phenyl)-6-cyclopropyl-3,4-dihydroisoquinolin-1(2H)-one; (R)-N-(3-(5-((1-Acryloylazetidin-2-yl)methoxy)-6-aminopyrimidin-4-yl)-5-fluoro-2-methylphenyl)-4-cyclopropyl-2-fluorobenzamide; (R)-N-(3-(5-((1-Acryloylpiperidin-3-yl)methoxy)-6-aminopyrimidin-4-yl)-5-fluoro-2-methylphenyl)-4-cyclopropyl-2-fluorobenzamide; N-(3-(5-(((2R,3S)-1-Acryloyl-3-methoxypyrrolidin-2-yl)methoxy)-6-aminopyrimidin-4-yl)-5-fluoro-2-methylphenyl)-4-cyclopropyl-2-fluorobenzamide; N-(3-(5-(((2S,4R)-1-Acryloyl-4-cyanopyrrolidin-2-yl)methoxy)-6-aminopyrimidin-4-yl)-5-fluoro-2-methylphenyl)-4-cyclopropyl-2-fluorobenzamide; or N-(3-(5-(((2S,4S)-1-Acryloyl-4-cyanopyrrolidin-2-yl)methoxy)-6-aminopyrimidin-4-yl)-5-fluoro-2-methylphenyl)-4-cyclopropyl-2-fluorobenzamide.

[0955] Unless otherwise provided, the chemical terms used above in describing the BTK inhibitor of Formula I are used according to their meanings as set out in International Application WO/2015/079417, which is herein incorporated by reference in its entirety.

[0956] In one embodiment, the kinase inhibitor is an mTOR inhibitor selected from temsirolimus; ridaforolimus (1R,2R,4S)-4-[(2R)-2[(1R,9S,12S,15R,16E,18R,19R,21R, 23S,24E,26E,28Z,30S,32S,35R)-1,18-dihydroxy-19,30-dimethoxy-15,17,21,23,29,35-hexamethyl-2,3,10,14,20-pentaoxo-11,36-dioxa-4-azatricyclo[30.3.1.0^{4.9}] hexatriaconta-16,24,26,28-tetraen-12-yl]propyl]-2-methoxycyclohexyl dimethylphosphinate, also known as AP23573 and MK8669; everolimus (RAD001); rapamycin (AY22989); simapimod; (5-{2,4-bis[(3S)-3-methylmorpholin-4-yl]pyrido[2,3-d]pyrimidin-7-yl}-2-methoxyphenyl)methanol (AZD8055); 2-amino-8-[trans-4-(2-hydroxyethoxy)cyclohexyl]-6-(6-methoxy-3-pyridinyl)-4-methyl-pyrido[2,3-d]pyrimidin-7(8H)-one (PF04691502); and N²-[1,4-dioxo-4-[[4-(4-oxo-8-phenyl-4H-1-benzopyran-2-yl)morpholinium-4-yl]methoxy]butyl]-L-arginylglycyl-L-α-aspartylL-serine-, inner salt (SEQ ID NO: 526) (SF1126); and XL765.

[0957] In one embodiment, the kinase inhibitor is an mTOR inhibitor, e.g., rapamycin, and the rapamycin is administered at a dose of about 3 mg, 4 mg, 5 mg, 6 mg, 7 mg, 8 mg, 9 mg, 10 mg (e.g., 6 mg) daily for a period of time, e.g., daily for 21 day cycle cycle, or daily for 28 day cycle. In one embodiment, 1, 2, 3, 4, 5, 6, 7, 8, 9, 10, 11, 12 or more cycles of rapamycin are administered. In one embodiment, the kinase inhibitor is an mTOR inhibitor, e.g., everolimus and the everolimus is administered at a dose of about 2 mg, 2.5 mg, 3 mg, 4 mg, 5 mg, 6 mg, 7 mg, 8 mg, 9 mg, 10 mg, 11 mg, 12 mg, 13 mg, 14 mg, 15 mg (e.g., 10 mg) daily for a period of time, e.g., daily for 28 day cycle. In one embodiment, 1, 2, 3, 4, 5, 6, 7, 8, 9, 10, 11, 12 or more cycles of everolimus are administered.

[0958] In one embodiment, the kinase inhibitor is an MNK inhibitor selected from CGP052088; 4-amino-3-(p-fluorophenylamino)-pyrazolo [3,4-d] pyrimidine (CGP57380); cercosporamide; ETC-1780445-2; and 4-amino-5-(4-fluoroanilino)-pyrazolo [3,4-d] pyrimidine.

[0959] In one embodiment, the kinase inhibitor is a dual phosphatidylinositol 3-kinase (PI3K) and mTOR inhibitor selected from 2-Amino-8-[trans-4-(2-hydroxyethoxy)cyclohexyl]-6-(6-methoxy-3-pyridinyl)-4-methyl-pyrido[2,3-d]pyrimidin-7(8H)-one (PF-04691502); N-[4-[[4-(Dimethylamino)-1-piperidinyl]carbonyl]phenyl]-N′-[4-(4,6-di-4-morpholinyl-1,3,5-triazin-2-yl)phenyl]urea (PF-05212384, PKI-587); 2-Methyl-2-{4-[3-methyl-2-oxo-8-(quinolin-3-yl)-2,3-dihydro-1H-imidazo[4,5-c]quinolin-1-yl]phenyl}propanenitrile (BEZ-235); apitolisib (GDC-0980, RG7422); 2,4-Difluoro-N-{2-(methyloxy)-5-[4-(4-pyridazinyl)-6-quinolinyl]-3-pyridinyl}benzenesulfonamide (GSK2126458); 8-(6-methoxypyridin-3-yl)-3-methyl-1-(4-(piperazin-1-yl)-3-(trifluoromethyl)phenyl)-1H-imidazo[4,5-c]quinolin-2(3H)-one Maleic acid (NVP-BGT226); 3-[4-(4-Morpholinylpyrido[3′,2′:4,5]furo[3,2-d]pyrimidin-2-yl]phenol (PI-103); 5-(9-isopropyl-8-methyl-2-morpholino-9H-purin-6-yl)pyrimidin-2-amine (VS-5584, SB2343); and N-[2-[(3,5-Dimethoxyphenyl)amino]quinoxalin-3-yl]-4-[(4-methyl-3-methoxyphenyl)carbonyl]aminophenylsulfonamide (XL765).

[0960] In one embodiment, the kinase inhibitor is an MNK inhibitor selected from CGP052088; 4-amino-3-(p-fluorophenylamino)-pyrazolo [3,4-d] pyrimidine (CGP57380); cercosporamide; ETC-1780445-2; and 4-amino-5-(4-fluoroanilino)-pyrazolo [3,4-d] pyrimidine.

[0961] In embodiments, the combination described herein, e.g., a CAR-expressing cell (e.g., CD19 CAR-expressing cell) and a PD-1 inhibitor, is administered to a subject in combination with a phosphoinositide 3-kinase (PI3K) inhibitor (e.g., a PI3K inhibitor described herein, e.g., idelalisib or duvelisib) and/or rituximab. In embodiments, a CAR-expressing cell described herein is administered to a subject in combination with idelalisib and rituximab. In embodiments, a CAR-expressing cell described herein is administered to a subject in combination with duvelisib and rituximab. Idelalisib (also called GS-1101 or CAL-101; Gilead) is a small molecule that blocks the delta isoform of PI3K. Idelalisib has the chemical name: (5-Fluoro-3 -phenyl-2-[(1S)-1-(7H-purin-6-ylamino)propyl]-4(3H)-quinazolinone).

[0962] Duvelisib (also called IPI-145; Infinity Pharmaceuticals and Abbvie) is a small molecule that blocks PI3K-δ,γ. Duvelisib has the chemical name (8-Chloro-2-phenyl-3-[(1S)-1-(9H-purin-6-ylamino)ethyl]-1(2H)-isoquinolinone).

[0963] In embodiments, the subject has CLL. In embodiments, the subject has relapsed CLL, e.g., the subject has previously been administered a cancer therapy (e.g., previously been administered an anti-CD20 antibody or previously been administered ibrutinib). For example, the subject has a deletion in the short arm of chromosome 17 (del(17p), e.g., in a leukemic cell). In other examples, the subject does not have a del(17p). In embodiments, the subject comprises a leukemic cell comprising a mutation in the immunoglobulin heavy-chain variable-region (IgV_{H}) gene. In other embodiments, the subject does not comprise a leukemic cell comprising a mutation in the immunoglobulin heavy-chain variable-region (IgV_{H}) gene. In embodiments, the subject has a deletion in the long arm of chromosome 11 (del(11q)). In other embodiments, the subject does not have a del(11q). In embodiments, idelalisib is administered at a dosage of about 100-400 mg (e.g., 100-125, 125-150, 150-175, 175-200, 200-225, 225-250, 250-275, 275-300, 325-350, 350-375, or 375-400 mg), e.g., BID. In embodiments, duvelisib is administered at a dosage of about 15-100 mg (e.g., about 15-25, 25-50, 50-75, or 75-100 mg), e.g., twice a day. In embodiments, rituximab is administered at a dosage of about 350-550 mg/m² (e.g., 350-375, 375-400, 400-425, 425-450, 450-475, or 475-500 mg/m²), e.g., intravenously.

[0964] In one embodiment, the kinase inhibitor is a dual phosphatidylinositol 3-kinase (PI3K) and mTOR inhibitor selected from 2-Amino-8-[trans-4-(2-hydroxyethoxy)cyclohexyl]-6-(6-methoxy-3-pyridinyl)-4-methyl-pyrido[2,3 -d]pyrimidin-7(8H)-one (PF-04691502); N-[4-[[4-(Dimethylamino)-1-piperidinyl]carbonyl]phenyl]-N′-[4-(4,6-di-4-morpholinyl-1,3,5-triazin-2-yl)phenyl]urea (PF-05212384, PKI-587); 2-Methyl-2-{4-[3-methyl-2-oxo-8-(quinolin-3-yl)-2,3-dihydro-1H-imidazo[4,5-c]quinolin-1-yl]phenyl}propanenitrile (BEZ-235); apitolisib (GDC-0980, RG7422); 2,4-Difluoro-N-{2-(methyloxy)-5-[4-(4-pyridazinyl)-6-quinolinyl]-3-pyridinyl}benzenesulfonamide (GSK2126458); 8-(6-methoxypyridin-3-yl)-3-methyl-1-(4-(piperazin-1-yl)-3-(trifluoromethyl)phenyl)-1H-imidazo[4,5-c]quinolin-2(3H)-one Maleic acid (NVP-BGT226); 3-[4-(4-Morpholinylpyrido[3′,2′:4,5]furo[3,2-d]pyrimidin-2-yl]phenol (PI-103); 5-(9-isopropyl-8-methyl-2-morpholino-9H-purin-6-yl)pyrimidin-2-amine (VS-5584, SB2343); and N-[2-[(3,5-Dimethoxyphenyl)amino]quinoxalin-3-yl]-4-[(4-methyl-3-methoxyphenyl)carbonyl]aminophenylsulfonamide (XL765).

[0965] In embodiments, a CAR-expressing cell described herein is administered to a subject in combination with an anaplastic lymphoma kinase (ALK) inhibitor. Exemplary ALK kinases include but are not limited to crizotinib (Pfizer), ceritinib (Novartis), alectinib (Chugai), brigatinib (also called AP26113; Ariad), entrectinib (Ignyta), PF-06463922 (Pfizer), TSR-011 (Tesaro) (see, e.g., Clinical Trial Identifier No. NCT02048488), CEP-37440 (Teva), and X-396 (Xcovery). In some embodiments, the subject has a solid cancer, e.g., a solid cancer described herein, e.g., lung cancer.

[0966] The chemical name of crizotinib is 3-[(1R)-1-(2,6-dichloro-3-fluorophenyl)ethoxy]-5-(1-piperidin-4-ylpyrazol-4-yl)pyridin-2-amine. The chemical name of ceritinib is 5-Chloro-N²-[2-isopropoxy-5-methyl-4-(4-piperidinyl)phenyl]-N⁴-[2-(isopropylsulfonyl)phenyl]-2,4-pyrimidinediamine. The chemical name of alectinib is 9-ethyl-6,6-dimethyl-8-(4-morpholinopiperidin-1-yl)-11-oxo-6,11-dihydro-5H-benzo [b]carbazole-3-carbonitrile. The chemical name of brigatinib is 5-Chloro-N²-{4-[4-(dimethylamino)-1-piperidinyl]-2-methoxyphenyl}-N⁴-[2-(dimethylphosphoryl)phenyl]-2,4-pyrimidinediamine. The chemical name of entrectinib is N-(5-(3,5-difluorobenzyl)-1H-indazol-3-yl)-4-(4-methylpiperazin-1-yl)-2-((tetrahydro-2H-pyran-4-yl)amino)benzamide. The chemical name of PF-06463922 is (10R)-7-Amino-12-fluoro-2,10,16-trimethyl-15-oxo-10,15,16,17-tetrahydro-2H-8,4-(metheno)pyrazolo[4,3-h][2,5,11]-benzoxadiazacyclotetradecine-3-carbonitrile. The chemical structure of CEP-37440 is (S)-2-((5-chloro-2-((6-(4-(2-hydroxyethyl)piperazin-1-yl)-1-methoxy-6,7,8,9-tetrahydro-5H-benzo[7]annulen-2-yl)amino)pyrimidin-4-yl)amino)-N-methylbenzamide. The chemical name of X-396 is (R)-6-amino-5-(1-(2,6-dichloro-3-fluorophenyl)ethoxy)-N-(4-(4-methylpiperazine-1-carbonyl)phenyl)pyridazine-3-carboxamide.

[0967] Drugs that inhibit either the calcium dependent phosphatase calcineurin (cyclosporine and FK506) or inhibit the p70S6 kinase that is important for growth factor induced signaling (rapamycin). (Liu et al., Cell 66:807-815, 1991; Henderson et al., Immun. 73:316-321, 1991; Bierer et al., Curr. Opin. Immun. 5:763-773, 1993) can also be used. In a further aspect, the cell compositions of the present disclosure may be administered to a patient in conjunction with (e.g., before, simultaneously or following) bone marrow transplantation, T cell ablative therapy using chemotherapy agents such as, fludarabine, external-beam radiation therapy (XRT), cyclophosphamide, and/or antibodies such as OKT3 or CAMPATH. In one aspect, the cell compositions of the present disclosure are administered following B-cell ablative therapy such as agents that react with CD20, e.g., Rituxan. For example, in one embodiment, subjects may undergo standard treatment with high dose chemotherapy followed by peripheral blood stem cell transplantation. In certain embodiments, following the transplant, subjects receive an infusion of the expanded immune cells of the present disclosure. In an additional embodiment, expanded cells are administered before or following surgery.

[0968] In embodiments, the combination described herein, e.g., a CAR-expressing cell (e.g., CD19 CAR-expressing cell) and a PD-1 inhibitor, is administered to a subject in combination with an indoleamine 2,3-dioxygenase (IDO) inhibitor. IDO is an enzyme that catalyzes the degradation of the amino acid, L-tryptophan, to kynurenine. Many cancers overexpress IDO, e.g., prostatic, colorectal, pancreatic, cervical, gastric, ovarian, head, and lung cancer. pDCs, macrophages, and dendritic cells (DCs) can express IDO. Without being bound by theory, it is thought that a decrease in L-tryptophan (e.g., catalyzed by IDO) results in an immunosuppressive milieu by inducing T-cell anergy and apoptosis. Thus, without being bound by theory, it is thought that an IDO inhibitor can enhance the efficacy of a CAR-expressing cell described herein, e.g., by decreasing the suppression or death of a CAR-expressing immune cell. In embodiments, the subject has a solid tumor, e.g., a solid tumor described herein, e.g., prostatic, colorectal, pancreatic, cervical, gastric, ovarian, head, or lung cancer. Exemplary inhibitors of IDO include but are not limited to 1-methyl-tryptophan, indoximod (NewLink Genetics) (see, e.g., Clinical Trial Identifier Nos. NCT01191216; NCT01792050), and INCB024360 (Incyte Corp.) (see, e.g., Clinical Trial Identifier Nos. NCT01604889; NCT01685255)

[0969] In embodiments, the combination described herein, e.g., a CAR-expressing cell (e.g., CD19 CAR-expressing cell) and a PD-1 inhibitor, is administered to a subject in combination with a modulator of myeloid-derived suppressor cells (MDSCs). MDSCs accumulate in the periphery and at the tumor site of many solid tumors. These cells suppress T cell responses, thereby hindering the efficacy of CAR-expressing cell therapy. Without being bound by theory, it is thought that administration of a MDSC modulator enhances the efficacy of a CAR-expressing cell described herein. In an embodiment, the subject has a solid tumor, e.g., a solid tumor described herein, e.g., glioblastoma. Exemplary modulators of MDSCs include but are not limited to MCS110 and BLZ945. MCS110 is a monoclonal antibody (mAb) against macrophage colony-stimulating factor (M-CSF). See, e.g., Clinical Trial Identifier No. NCT00757757. BLZ945 is a small molecule inhibitor of colony stimulating factor 1 receptor (CSF1R). See, e.g., Pyonteck et al. Nat. Med. 19(2013):1264-72. The structure of BLZ945 is shown below.

[chemical structure]

[0970] In embodiments, the combination described herein, e.g., a CAR-expressing cell (e.g., CD19 CAR-expressing cell) and a PD-1 inhibitor, herein is administered to a subject in combination with an agent that inhibits or reduces the activity of immunosuppressive plasma cells. Immunosuppressive plasma cells have been shown to impede T cell-dependent immunogenic chemotherapy, such as oxaliplatin (Shalapour et al., Nature 2015, 521:94-101). In an embodiment, immunosuppressive plasma cells can express one or more of IgA, interleukin (IL)-10, and PD-L1. In an embodiment, the agent is a BCMA CAR-expressing cell.

[0971] In some embodiments , the combination described herein, e.g., a CAR-expressing cell (e.g., CD19 CAR-expressing cell) and a PD-1 inhibitor, is administered to a subject in combination with a interleukin-15 (IL-15) polypeptide, a interleukin-15 receptor alpha (IL-15Ra) polypeptide, or a combination of both a IL-15 polypeptide and a IL-15Ra polypeptide e.g., hetIL-15 (Admune Therapeutics, LLC). hetIL-15 is a heterodimeric non-covalent complex of IL-15 and IL-15Ra. hetIL-15 is described in, e.g., U.S. Pat. No. 8,124,084, U.S. 2012/0177598, U.S. 2009/0082299, U.S. 2012/0141413, and U.S. 2011/0081311, incorporated herein by reference. In embodiments, het-IL-15 is administered subcutaneously. In embodiments, the subject has a cancer, e.g., solid cancer, e.g., melanoma or colon cancer. In embodiments, the subject has a metastatic cancer.

[0972] In embodiments, a subject having a disease described herein is administered a combination described herein, e.g., a CAR-expressing cell (e.g., CD19 CAR-expressing cell) and a PD-1 inhibitor, in combination with an agent, e.g., cytotoxic or chemotherapy agent, a biologic therapy (e.g., antibody, e.g., monoclonal antibody, or cellular therapy), or an inhibitor (e.g., kinase inhibitor). In embodiments, the subject is administered a CAR-expressing cell described herein in combination with a cytotoxic agent, e.g., CPX-351 (Celator Pharmaceuticals), cytarabine, daunorubicin, vosaroxin (Sunesis Pharmaceuticals), sapacitabine (Cyclacel Pharmaceuticals), idarubicin, or mitoxantrone. CPX-351 is a liposomal formulation comprising cytarabine and daunorubicin at a 5:1 molar ratio. In embodiments, the subject is administered a CAR-expressing cell described herein in combination with a hypomethylating agent, e.g., a DNA methyltransferase inhibitor, e.g., azacitidine or decitabine. In embodiments, the subject is administered a CAR-expressing cell described herein in combination with a biologic therapy, e.g., an antibody or cellular therapy, e.g., 225Ac-lintuzumab (Actimab-A; Actinium Pharmaceuticals), IPH2102 (Innate Pharma/Bristol Myers Squibb), SGN-CD33A (Seattle Genetics), or gemtuzumab ozogamicin (Mylotarg; Pfizer). SGN-CD33A is an antibody-drug conjugate (ADC) comprising a pyrrolobenzodiazepine dimer that is attached to an anti-CD33 antibody. Actimab-A is an anti-CD33 antibody (lintuzumab) labeled with actinium. IPH2102 is a monoclonal antibody that targets killer immunoglobulin-like receptors (KIRs). In embodiments, the subject is administered a CAR-expressing cell described herein in combination a FLT3 inhibitor, e.g., sorafenib (Bayer), midostaurin (Novartis), quizartinib (Daiichi Sankyo), crenolanib (Arog Pharmaceuticals), PLX3397 (Daiichi Sankyo), AKN-028 (Akinion Pharmaceuticals), or ASP2215 (Astellas). In embodiments, the subject is administered a CAR-expressing cell described herein in combination with an isocitrate dehydrogenase (IDH) inhibitor, e.g., AG-221 (Celgene/Agios) or AG-120 (Agios/Celgene). In embodiments, the subject is administered a CAR-expressing cell described herein in combination with a cell cycle regulator, e.g., inhibitor of polo-like kinase 1 (Plk1), e.g., volasertib (Boehringer Ingelheim); or an inhibitor of cyclin-dependent kinase 9 (Cdk9), e.g., alvocidib (Tolero Pharmaceuticals/Sanofi Aventis). In embodiments, the subject is administered a CAR-expressing cell described herein in combination with a B cell receptor signaling network inhibitor, e.g., an inihibitor of B-cell lymphoma 2 (Bc1-2), e.g., venetoclax (Abbvie/Roche); or an inhibitor of Bruton's tyrosine kinase (Btk), e.g., ibrutinib (Pharmacyclics/Johnson & Johnson Janssen Pharmaceutical). In embodiments, the subject is administered a CAR-expressing cell described herein in combination with an inhibitor of M1 aminopeptidase, e.g., tosedostat (CTI BioPharma/Vernalis); an inhibitor of histone deacetylase (HDAC), e.g., pracinostat (MEI Pharma); a multi-kinase inhibitor, e.g., rigosertib (Onconova Therapeutics/Baxter/SymBio); or a peptidic CXCR4 inverse agonist, e.g., BL-8040 (BioLineRx).

[0973] In another embodiment, the subjects receive an infusion of the CAR-expressing cell, e.g., compositions of the present disclosure prior to transplantation, e.g., allogeneic stem cell transplant, of cells. In a preferred embodiment, CAR expressing cells transiently express CAR, e.g., by electroporation of an mRNA encoding a CAR, whereby the expression of the CAR is terminated prior to infusion of donor stem cells to avoid engraftment failure.

[0974] Some patients may experience allergic reactions to the compounds of the present disclosure and/or other anti-cancer agent(s) during or after administration; therefore, anti-allergic agents are often administered to minimize the risk of an allergic reaction. Suitable anti-allergic agents include corticosteroids, such as dexamethasone (e.g., Decadron®), beclomethasone (e.g., Beclovent®), hydrocortisone (also known as cortisone, hydrocortisone sodium succinate, hydrocortisone sodium phosphate, and sold under the tradenames Ala-Cort®, hydrocortisone phosphate, Solu-Cortef®, Hydrocort Acetate® and Lanacort®), prednisolone (sold under the tradenames Delta-Cortel®, Orapred®, Pediapred® and Prelone®), prednisone (sold under the tradenames Deltasone®, Liquid Red®, Meticorten® and Orasone®), methylprednisolone (also known as 6-methylprednisolone, methylprednisolone acetate, methylprednisolone sodium succinate, sold under the tradenames Duralone®, Medralone®, Medrol®, M-Prednisol® and Solu-Medrol®); antihistamines, such as diphenhydramine (e.g., Benadryl®), hydroxyzine, and cyproheptadine; and bronchodilators, such as the beta-adrenergic receptor agonists, albuterol (e.g., Proventil®), and terbutaline (Brethine®).

[0975] Some patients may experience nausea during and after administration of the compound of the present disclosure and/or other anti-cancer agent(s); therefore, anti-emetics are used in preventing nausea (upper stomach) and vomiting. Suitable anti-emetics include aprepitant (Emend®), ondansetron (Zofran®), granisetron HCl (Kytril®), lorazepam (Ativan®. dexamethasone (Decadron®), prochlorperazine (Compazine®), casopitant (Rezonic® and Zunrisa®), and combinations thereof.

[0976] Medication to alleviate the pain experienced during the treatment period is often prescribed to make the patient more comfortable. Common over-the-counter analgesics, such Tylenol®, are often used. However, opioid analgesic drugs such as hydrocodone/paracetamol or hydrocodone/acetaminophen (e.g., Vicodin®), morphine (e.g., Astramorph® or Avinza®), oxycodone (e.g., OxyContin® or Percocet®), oxymorphone hydrochloride (Opana®), and fentanyl (e.g., Duragesic®) are also useful for moderate or severe pain.

[0977] In an effort to protect normal cells from treatment toxicity and to limit organ toxicities, cytoprotective agents (such as neuroprotectants, free-radical scavengers, cardioprotectors, anthracycline extravasation neutralizers, nutrients and the like) may be used as an adjunct therapy. Suitable cytoprotective agents include Amifostine (Ethyol®), glutamine, dimesna (Tavocept®), mesna (Mesnex®), dexrazoxane (Zinecard® or Totect®), xaliproden (Xaprila®), and leucovorin (also known as calcium leucovorin, citrovorum factor and folinic acid). The structure of the active compounds identified by code numbers, generic or trade names may be taken from the actual edition of the standard compendium “The Merck Index” or from databases, e.g. Patents International (e.g. IMS World Publications).

[0978] The above-mentioned compounds, which can be used in combination with a compound of the present disclosure, can be prepared and administered as described in the art, such as in the documents cited above.

[0979] In one embodiment, the present disclosure provides pharmaceutical compositions comprising at least one compound of the present disclosure (e.g., a compound of the present disclosure) or a pharmaceutically acceptable salt thereof together with a pharmaceutically acceptable carrier suitable for administration to a human or animal subject, either alone or together with other anti-cancer agents.

[0980] In one embodiment, the present disclosure provides methods of treating human or animal subjects suffering from a cellular proliferative disease, such as cancer. The present disclosure provides methods of treating a human or animal subject in need of such treatment, comprising administering to the subject a therapeutically effective amount of a compound of the present disclosure (e.g., a compound of the present disclosure) or a pharmaceutically acceptable salt thereof, either alone or in combination with other anti-cancer agents.

[0981] In particular, compositions will either be formulated together as a combination therapeutic or administered separately.

[0982] In combination therapy, the compound of the present disclosure and other anti-cancer agent(s) may be administered either simultaneously, concurrently or sequentially with no specific time limits, wherein such administration provides therapeutically effective levels of the two compounds in the body of the patient.

[0983] In a preferred embodiment, the compound of the present disclosure and the other anti-cancer agent(s) is generally administered sequentially in any order by infusion or orally. The dosing regimen may vary depending upon the stage of the disease, physical fitness of the patient, safety profiles of the individual drugs, and tolerance of the individual drugs, as well as other criteria well-known to the attending physician and medical practitioner(s) administering the combination. The compound of the present disclosure and other anti-cancer agent(s) may be administered within minutes of each other, hours, days, or even weeks apart depending upon the particular cycle being used for treatment. In addition, the cycle could include administration of one drug more often than the other during the treatment cycle and at different doses per administration of the drug.

[0984] In another aspect of the present disclosure, kits that include one or more compound of the present disclosure and a combination partner as disclosed herein are provided. Representative kits include (a) a compound of the present disclosure or a pharmaceutically acceptable salt thereof, (b) at least one combination partner, e.g., as indicated above, whereby such kit may comprise a package insert or other labeling including directions for administration.

[0985] A compound of the present disclosure may also be used to advantage in combination with known therapeutic processes, for example, the administration of hormones or especially radiation. A compound of the present disclosure may in particular be used as a radiosensitizer, especially for the treatment of tumors which exhibit poor sensitivity to radiotherapy. In one embodiment, the subject can be administered an agent which reduces or ameliorates a side effect associated with the administration of a CAR-expressing cell. Side effects associated with the administration of a CAR-expressing cell include, but are not limited to CRS, and hemophagocytic lymphohistiocytosis (HLH), also termed Macrophage Activation Syndrome (MAS).

[0986] Accordingly, the methods described herein can comprise administering a CAR-expressing cell described herein to a subject and further administering one or more agents to manage elevated levels of a soluble factor resulting from treatment with a CAR-expressing cell. In one embodiment, the soluble factor elevated in the subject is one or more of IFN-γ, TNFα, IL-2 and IL-6. In an embodiment, the factor elevated in the subject is one or more of IL-1, GM-CSF, IL-10, IL-8, IL-5 and fraktalkine. Therefore, an agent administered to treat this side effect can be an agent that neutralizes one or more of these soluble factors. In one embodiment, the agent that neutralizes one or more of these soluble forms is an antibody or antigen binding fragment thereof. Examples of such agents include, but are not limited to a steroid (e.g., corticosteroid), an inhibitor of TNFα, and an inhibitor of IL-6. An example of a TNFα inhibitor is an anti-TNFα antibody molecule such as, infliximab, adalimumab, certolizumab pegol, and golimumab. Another example of a TNFα inhibitor is a fusion protein such as entanercept. Small molecule inhibitor of TNFα include, but are not limited to, xanthine derivatives (e.g. pentoxifylline) and bupropion. An example of an IL-6 inhibitor is an anti-IL-6 antibody molecule such as tocilizumab (toc), sarilumab, elsilimomab, CNTO 328, ALD518/BMS-945429, CNTO 136, CPSI-2364, CDP6038, VX30, ARGX-109, FE301, and FM101. In one embodiment, the anti-IL-6 antibody molecule is tocilizumab. An example of an IL-1R based inhibitor is anakinra.

[0987] In some embodiment, the subject is administered a corticosteroid, such as, e.g., methylprednisolone, hydrocortisone, among others.

[0988] In some embodiments, the subject is administered a vasopressor, such as, e.g., norepinephrine, dopamine, phenylephrine, epinephrine, vasopressin, or a combination thereof.

[0989] In an embodiment, the subject can be administered an antipyretic agent. In an embodiment, the subject can be administered an analgesic agent.

[0990] In one embodiment, the subject can be further administered an agent which enhances the activity or fitness of a CAR-expressing cell. For example, in one embodiment, the agent can be an agent which inhibits a molecule that modulates or regulates, e.g., inhibits, T cell function. In some embodiments, the molecule that modulates or regulates T cell function is an inhibitory molecule. Inhibitory molecules, e.g., Programmed Death 1 (PD-1) or PD-1 ligand (PD-L1), can, in some embodiments, decrease the ability of a CAR-expressing cell to mount an immune effector response. Examples of inhibitory molecules include PD-1, PD-L1, CTLA4, TIM3, CEACAM (e.g., CEACAM-1, CEACAM-3 and/or CEACAM-5), LAGS, VISTA, BTLA, TIGIT, LAIR1, CD160, 2B4, CD80, CD86, B7-H3 (CD276), B7-H4 (VTCN1), HVEM (TNFRSF14 or CD270), KIR, A2aR, MHC class I, MHC class II, GALS, adenosine, and TGF beta. Inhibition of a molecule that modulates or regulates, e.g., inhibits, T cell function, e.g., by inhibition at the DNA, RNA or protein level, can optimize a CAR-expressing cell performance. In embodiments, an agent, e.g., an inhibitory nucleic acid, e.g., an inhibitory nucleic acid, e.g., an inhibitory nucleic acid, e.g., a dsRNA, e.g., an siRNA or shRNA, a clustered regularly interspaced short palindromic repeats (CRISPR), a transcription-activator like effector nuclease (TALEN), or a zinc finger endonuclease (ZFN), e.g., as described herein, can be used to inhibit expression of an inhibitory molecule in the CAR-expressing cell. In an embodiment, the inhibitor is an shRNA.

[0991] In an embodiment, the agent that modulates or regulates, e.g., inhibits, T-cell function is inhibited within a CAR-expressing cell. In these embodiments, a dsRNA molecule that inhibits expression of a molecule that modulates or regulates, e.g., inhibits, T-cell function is linked to the nucleic acid that encodes a component, e.g., all of the components, of the CAR. In an embodiment, a nucleic acid molecule that encodes a dsRNA molecule that inhibits expression of the molecule that modulates or regulates, e.g., inhibits, T-cell function is operably linked to a promoter, e.g., a H1- or a U6-derived promoter such that the dsRNA molecule that inhibits expression of the molecule that modulates or regulates, e.g., inhibits, T-cell function is expressed, e.g., is expressed within a CAR-expressing cell. See e.g., Tiscornia G., “Development of Lentiviral Vectors Expressing siRNA,” Chapter 3, in Gene Transfer: Delivery and Expression of DNA and RNA (eds. Friedmann and Rossi). Cold Spring Harbor Laboratory Press, Cold Spring Harbor, N.Y., USA, 2007; Brummelkamp T R, et al. (2002) Science 296: 550-553; Miyagishi M, et al. (2002) Nat. Biotechnol. 19: 497-500. In an embodiment the nucleic acid molecule that encodes a dsRNA molecule that inhibits expression of the molecule that modulates or regulates, e.g., inhibits, T-cell function is present on the same vector, e.g., a lentiviral vector, that comprises a nucleic acid molecule that encodes a component, e.g., all of the components, of the CAR. In such an embodiment, the nucleic acid molecule that encodes a dsRNA molecule that inhibits expression of the molecule that modulates or regulates, e.g., inhibits, T-cell function is located on the vector, e.g., the lentiviral vector, 5′- or 3′- to the nucleic acid that encodes a component, e.g., all of the components, of the CAR. The nucleic acid molecule that encodes a dsRNA molecule that inhibits expression of the molecule that modulates or regulates, e.g., inhibits, T-cell function can be transcribed in the same or different direction as the nucleic acid that encodes a component, e.g., all of the components, of the CAR. In an embodiment the nucleic acid molecule that encodes a dsRNA molecule that inhibits expression of the molecule that modulates or regulates, e.g., inhibits, T-cell function is present on a vector other than the vector that comprises a nucleic acid molecule that encodes a component, e.g., all of the components, of the CAR. In an embodiment, the nucleic acid molecule that encodes a dsRNA molecule that inhibits expression of the molecule that modulates or regulates, e.g., inhibits, T-cell function it transiently expressed within a CAR-expressing cell. In an embodiment, the nucleic acid molecule that encodes a dsRNA molecule that inhibits expression of the molecule that modulates or regulates, e.g., inhibits, T-cell function is stably integrated into the genome of a CAR-expressing cell. Configurations of exemplary vectors for expressing a component, e.g., all of the components, of the CAR with a dsRNA molecule that inhibits expression of the molecule that modulates or regulates, e.g., inhibits, T-cell function, is provided, e.g., in FIG. 47 of International Publication WO2015/090230, filed Dec. 19, 2014, which is herein incorporated by reference.

Combination Therapies with Inhibitors of Checkpoint Molecules

[0992] In one embodiment, the agent that modulates or regulates, e.g., inhibits, T-cell function can be, e.g., an antibody or antibody fragment that binds to an inhibitory molecule. For example, the agent can be an antibody or antibody fragment that binds to PD-1, PD-L1, PD-L2 or CTLA4 (e.g., ipilimumab (also referred to as MDX-010 and MDX-101, and marketed as Yervoy®; Bristol-Myers Squibb; Tremelimumab (IgG2 monoclonal antibody available from Pfizer, formerly known as ticilimumab, CP-675,206).). In an embodiment, the agent is an antibody or antibody fragment that binds to TIM3. In an embodiment, the agent is an antibody or antibody fragment that binds to LAG3. In an embodiment, the agent is an antibody or antibody fragment that binds to PD-L1.

[0993] PD-1 is described in greater detail above. Two ligands for PD1, PD-L1 and PD-L2 have been shown to downregulate T cell activation upon binding to PD1 (Freeman et a. 2000 J Exp Med 192:1027-34; Latchman et al. 2001 Nat Immunol 2:261-8; Carter et al. 2002 Eur J Immunol 32:634-43). PD-L1 is abundant in human cancers (Dong et al. 2003 J Mol Med 81:281-7; Blank et al. 2005 Cancer Immunol. Immunother 54:307-314; Konishi et al. 2004 Clin Cancer Res 10:5094). Immune suppression can be reversed by inhibiting the local interaction of PD1 with PD-L1. The term “Programmed Death Ligand 1” or “PD-L1” include isoforms, mammalian, e.g., human PD-L1, species homologs of human PD-1, and analogs comprising at least one common epitope with PD-L1. The amino acid sequence of PD-L1, e.g., human PD-1, is known in the art, e.g., Dong et al. (1999) Nat Med. 5(12):1365-9; Freeman et al. (2000) J Exp Med. 192(7):1027-34).

[0994] Antibodies, antibody fragments, and other inhibitors (e.g., small molecule; polypeptide, e.g., a fusion protein; or inhibitory nucleic acid; e.g., a siRNA or shRNA inhibitors), e.g., of PD-L1 and PD-L2 are available in the art and may be used combination with a CAR (e.g., CD19 CAR) (e.g., and a PD-1 inhibitor) described herein. MEDI4736 (Medimmune) is a human monoclonal antibody that binds to PDL1, and inhibits interaction of the ligand with PD1.

[0995] In one embodiment, the anti-PD-L1 antibody is an anti-PD-L1 antibody molecule as disclosed in in US 2016/0108123, published on Apr. 21, 2016, entitled “Antibody Molecules to PD-L1 and Uses Thereof,” incorporated by reference in its entirety.

[0996] In some embodiments, the anti-PD-L1 antibody is MSB0010718C. MSB0010718C (also referred to as A09-246-2; Merck Serono or avelumab) is a monoclonal antibody that binds to PD-L1. Exemplary humanized anti-PD-L1 antibodies are disclosed in WO2013/079174 (incorporated herein by reference), and having a sequence disclosed herein (or a sequence substantially identical or similar thereto, e.g., a sequence at least 85%, 90%, 95% identical or higher to the sequence specified).

[0997] MDPL3280A (Genentech/Roche) is a human Fc optimized IgG1 monoclonal antibody that binds to PD-L1. MDPL3280A, also known as Atezolizumab, and other human monoclonal antibodies to PD-L1 are disclosed in U.S. Pat. No. 7,943,743 and U.S Publication No.: 20120039906, incorporated herein by reference.

[0998] In one embodiment, the anti-PD-L1 antibody molecule comprises one or more of the CDR sequences (or collectively all of the CDR sequences), the heavy chain or light chain variable region sequence, or the heavy chain or light chain sequence of Atezolizumab. In embodiments, Atezolizumab is administered in combination with a CAR

[0999] In an embodiment, a CAR therapy, e.g., a CAR-expressing cell (e.g., CD19 CAR-expressing cell) can be used in combination with an anti-PDL1 antibody (e.g., Atezolizumab) for treating a subject with a lymphoma, e.g., DLBCL. In some embodiments, the subject has DLBCL, e.g., r/r DLBCL, and has had prior anti-CD20 and anthracycline therapy. In some embodiments, Atezolizumab can be administered concurrently with, before or after administration of a CAR therapy (e.g., a CD19 CAR-expressing cell). In some embodiments, Atezolizumab is administered concurrently with a CAR therapy (e.g., a CD19 CAR-expressing cell). In some embodiments, Atezolizumab is administered at least one time (e.g., one, two, three, four, five, six or more times) at a dose of 1200 mg (e.g., 1000, 1200, 1500 or 2000 mg) every 3 weeks. In some embodiments, Atezolizumab is administered four times at a dose of 1200 mg every 3 weeks.

[1000] Other anti-PD-L1 binding agents include YW243.55.S70 (heavy and light chain variable regions are shown in SEQ ID NOs: 20 and 21 in WO2010/077634) and MDX-1105 (also referred to as BMS-936559, and, e.g., anti-PD-L1 binding agents disclosed in WO2007/005874). AMP-224 (B7-DCIg; Amplimmune; e.g., disclosed in WO2010/027827 and WO2011/066342), is a PD-L2 Fc fusion soluble receptor that blocks the interaction between PD1 and B7-H1. Examples of RNAi agents include long dsRNA, siRNA, shRNA, and microRNAs. Inhibitory nucleic acids described herein include, but are not limited to, an aptamer, a morpholino, a ribozyme, and a nucleic acid sequence, e.g., plasmids or vectors, that comprise or encode a long dsRNA, siRNA, shRNA, or microRNA.

[1001] TIM3 (T cell immunoglobulin-3) also negatively regulates T cell function, particularly in IFN-g-secreting CD4+ T helper 1 and CD8+ T cytotoxic 1 cells, and plays a critical role in T cell exhaustion. Inhibition of the interaction between TIM3 and its ligands, e.g., galectin-9 (Gal9), phosphotidylserine (PS), and HMGB1, can increase immune response. Antibodies, antibody fragments, and other inhibitors of TIM3 and its ligands are available in the art and may be used combination with a CAR (e.g., CD19 CAR) described herein. For example, antibodies, antibody fragments, small molecules, or peptide inhibitors that target TIM3 binds to the IgV domain of TIM3 to inhibit interaction with its ligands. Antibodies and peptides that inhibit TIM3 are disclosed in WO2013/006490 and US20100247521. Other anti-TIM3 antibodies include humanized versions of RMT3-23 (disclosed in Ngiow et al., 2011, Cancer Res, 71:3540-3551), and clone 8B.2C12 (disclosed in Monney et al., 2002, Nature, 415:536-541). Bi-specific antibodies that inhibit TIM3 and PD-1 are disclosed in US20130156774.

[1002] In one embodiment, the anti-TIM3 antibody or fragment thereof is an anti-TIM3 antibody molecule as described in US 2015/0218274, entitled “Antibody Molecules to TIM3 and Uses Thereof,” incorporated by reference in its entirety. In one embodiment, the anti-TIM3 antibody molecule includes at least one, two, three, four, five or six CDRs (or collectively all of the CDRs) from a heavy and light chain variable region from an antibody chosen from any of ABTIM3, ABTIM3-hum01, ABTIM3-hum02, ABTIM3-hum03, ABTIM3-hum04, ABTIM3-hum05, ABTIM3-hum06, ABTIM3-hum07, ABTIM3-hum08, ABTIM3-hum09, ABTIM3-hum10, ABTIM3-hum11, ABTIM3-hum12, ABTIM3-hum13, ABTIM3-hum14, ABTIM3-hum15, ABTIM3-hum16, ABTIM3-hum17, ABTIM3-hum18, ABTIM3-hum19, ABTIM3-hum20, ABTIM3-hum21, ABTIM3-hum22, ABTIM3-hum23; or as described in Tables 1-4 of US 2015/0218274; or encoded by the nucleotide sequence in Tables 1-4; or a sequence substantially identical (e.g., at least 80%, 85%, 90%, 92%, 95%, 97%, 98%, 99% or higher identical) to any of the aforesaid sequences, or closely related CDRs, e.g., CDRs which are identical or which have at least one amino acid alteration, but not more than two, three or four alterations (e.g., substitutions, deletions, or insertions, e.g., conservative substitutions).

[1003] In yet another embodiment, the anti-TIM3 antibody molecule comprises at least one, two, three or four variable regions from an antibody described herein, e.g., an antibody chosen from any of ABTIM3, ABTIM3-hum01, ABTIM3-hum02, ABTIM3-hum03, ABTIM3-hum04, ABTIM3-hum05, ABTIM3-hum06, ABTIM3-hum07, ABTIM3-hum08, ABTIM3-hum09, ABTIM3-hum10, ABTIM3-hum11, ABTIM3-hum12, ABTIM3-hum13, ABTIM3-hum14, ABTIM3-hum15, ABTIM3-hum16, ABTIM3-hum17, ABTIM3-hum18, ABTIM3-hum19, ABTIM3-hum20, ABTIM3-hum21, ABTIM3-hum22, ABTIM3-hum23; or as described in Tables 1-4 of US 2015/0218274; or encoded by the nucleotide sequence in Tables 1-4; or a sequence substantially identical (e.g., at least 80%, 85%, 90%, 92%, 95%, 97%, 98%, 99% or higher identical) to any of the aforesaid sequences.

[1004] In other embodiments, the agent which enhances the activity of a CAR-expressing cell is a CEACAM inhibitor (e.g., CEACAM-1, CEACAM-3, and/or CEACAM-5 inhibitor). In one embodiment, the inhibitor of CEACAM is an anti-CEACAM antibody molecule. Exemplary anti-CEACAM-1 antibodies are described in WO 2010/125571, WO 2013/082366 WO 2014/059251 and WO 2014/022332, e.g., a monoclonal antibody 34B1, 26H7, and 5F4; or a recombinant form thereof, as described in, e.g., US 2004/0047858, U.S. Pat. No. 7,132,255 and WO 99/052552. In other embodiments, the anti-CEACAM antibody binds to CEACAM-5 as described in, e.g., Zheng et al. PLoS One. 2010 Sep 2; 5(9). pii: e12529 (DOI:10:1371/journal.pone.0021146), or crossreacts with CEACAM-1 and CEACAM-5 as described in, e.g., WO 2013/054331 and US 2014/0271618.

[1005] Without wishing to be bound by theory, carcinoembryonic antigen cell adhesion molecules (CEACAM), such as CEACAM-1 and CEACAM-5, are believed to mediate, at least in part, inhibition of an anti-tumor immune response (see e.g., Markel et al. J Immunol. 2002 Mar. 15; 168(6):2803-10; Markel et al. J Immunol. 2006 Nov. 1; 177(9):6062-71; Markel et al. Immunology. 2009 February; 126(2):186-200; Markel et al. Cancer Immunol Immunother. 2010 February; 59(2):215-30; Ortenberg et al. Mol Cancer Ther. 2012 June; 11(6):1300-10; Stern et al. J Immunol. 2005 Jun. 1; 174(11):6692-701; Zheng et al. PLoS One. 2010 Sep. 2; 5(9). pii: e12529). For example, CEACAM-1 has been described as a heterophilic ligand for TIM-3 and as playing a role in TIM-3-mediated T cell tolerance and exhaustion (see e.g., WO 2014/022332; Huang, et al. (2014) Nature doi:10.1038/nature13848). In embodiments, co-blockade of CEACAM-1 and TIM-3 has been shown to enhance an anti-tumor immune response in xenograft colorectal cancer models (see e.g., WO 2014/022332; Huang, et al. (2014), supra). In other embodiments, co-blockade of CEACAM-1 and PD-1 reduce T cell tolerance as described, e.g., in WO 2014/059251. Thus, CEACAM inhibitors can be used with the other immunomodulators described herein (e.g., anti-PD-1 and/or anti-TIM-3 inhibitors) to enhance an immune response against a cancer, e.g., a melanoma, a lung cancer (e.g., NSCLC), a bladder cancer, a colon cancer an ovarian cancer, and other cancers as described herein.

[1006] LAG3 (lymphocyte activation gene-3 or CD223) is a cell surface molecule expressed on activated T cells and B cells that has been shown to play a role in CD8+ T cell exhaustion. Antibodies, antibody fragments, and other inhibitors of LAG3 and its ligands are available in the art and may be used combination with a CAR (e.g., CD19 CAR) described herein. For example, BMS-986016 (Bristol-Myers Squib) is a monoclonal antibody that targets LAG3. IMP701 (Immutep) is an antagonist LAG3 antibody and IMP731 (Immutep and GlaxoSmithKline) is a depleting LAG3 antibody. Other LAG3 inhibitors include IMP321 (Immutep), which is a recombinant fusion protein of a soluble portion of LAG3 and Ig that binds to MHC class II molecules and activates antigen presenting cells (APC). Other antibodies are disclosed, e.g., in WO2010/019570.

[1007] In one embodiment, the anti-LAG3 antibody or fragment thereof is an anti-LAG3 antibody molecule as described in US 2015/0259420, entitled “Antibody Molecules to LAG3 and Uses Thereof,” incorporated by reference in its entirety. In one embodiment, the anti-LAG3 antibody molecule includes at least one, two, three, four, five or six CDRs (or collectively all of the CDRs) from a heavy and light chain variable region from an antibody chosen from any of BAP050-hum01, BAP050-hum02, BAP050-hum03, BAP050-hum04, BAP050-hum05, BAP050-hum06, BAP050-hum07, BAP050-hum08, BAP050-hum09, BAP050-hum10, BAP050-hum11, BAP050-hum12, BAP050-hum13, BAP050-hum14, BAP050-hum15, BAP050-hum16, BAP050-hum17, BAP050-hum18, BAP050-hum19, BAP050-hum20, huBAP050(Ser) (e.g., BAP050-hum01-Ser, BAP050-hum02-Ser, BAP050-hum03-Ser, BAP050-hum04-Ser, BAP050-hum05-Ser, BAP050-hum06-Ser, BAP050-hum07-Ser, BAP050-hum08-Ser, BAP050-hum09-Ser, BAP050-hum10-Ser, BAP050-hum11-Ser, BAP050-hum12-Ser, BAP050-hum13-Ser, BAP050-hum14-Ser, BAP050-hum15-Ser, BAP050-hum18-Ser, BAP050-hum19-Ser, or BAP050-hum20-Ser), BAP050-Clone-F, BAP050-Clone-G, BAP050-Clone-H, BAP050-Clone-I, or BAP050-Clone-J; or as described in Table 1 of US 2015/0259420; or encoded by the nucleotide sequence in Table 1; or a sequence substantially identical (e.g., at least 80%, 85%, 90%, 92%, 95%, 97%, 98%, 99% or higher identical) to any of the aforesaid sequences, or closely related CDRs, e.g., CDRs which are identical or which have at least one amino acid alteration, but not more than two, three or four alterations (e.g., substitutions, deletions, or insertions, e.g., conservative substitutions).

[1008] In yet another embodiment, the anti-LAG3 antibody molecule comprises at least one, two, three or four variable regions from an antibody described herein, e.g., an antibody chosen from any of BAP050-hum01, BAP050-hum02, BAP050-hum03, BAP050-hum04, BAP050-hum05, BAP050-hum06, BAP050-hum07, BAP050-hum08, BAP050-hum09, BAP050-hum10, BAP050-hum11, BAP050-hum12, BAP050-hum13, BAP050-hum14, BAP050-hum15, BAP050-hum16, BAP050-hum17, BAP050-hum18, BAP050-hum19, BAP050-hum20, huBAP050(Ser) (e.g., BAP050-hum01-Ser, BAP050-hum02-Ser, BAP050-hum03-Ser, BAP050-hum04-Ser, BAP050-hum05-Ser, BAP050-hum06-Ser, BAP050-hum07-Ser, BAP050-hum08-Ser, BAP050-hum09-Ser, BAP050-hum10-Ser, BAP050-hum11-Ser, BAP050-hum12-Ser, BAP050-hum13-Ser, BAP050-hum14-Ser, BAP050-hum15-Ser, BAP050-hum18-Ser, BAP050-hum19-Ser, or BAP050-hum20-Ser), BAP050-Clone-F, BAP050-Clone-G, BAP050-Clone-H, BAP050-Clone-I, or BAP050-Clone-J; or as described in Table 1 of US 2015/0259420; or encoded by the nucleotide sequence in Tables 1; or a sequence substantially identical (e.g., at least 80%, 85%, 90%, 92%, 95%, 97%, 98%, 99% or higher identical) to any of the aforesaid sequences.

[1009] In some embodiments, the agent which enhances the activity of a CAR-expressing cell can be, e.g., a fusion protein comprising a first domain and a second domain, wherein the first domain is an inhibitory molecule, or fragment thereof, and the second domain is a polypeptide that is associated with a positive signal, e.g., a polypeptide comprising an intracellular signaling domain as described herein. In some embodiments, the polypeptide that is associated with a positive signal can include a costimulatory domain of CD28, CD27, ICOS, e.g., an intracellular signaling domain of CD28, CD27 and/or ICOS, and/or a primary signaling domain, e.g., of CD3 zeta, e.g., described herein. In one embodiment, the fusion protein is expressed by the same cell that expressed the CAR. In another embodiment, the fusion protein is expressed by a cell, e.g., a T cell that does not express a CAR of the present disclosure.

[1010] In embodiments, the subject is administered an additional agent (in further combination with a CAR-expressing cell and a PD-1 inhibitor described herein), where the additional agent is an inhibitor of an inhibitory molecule, e.g., checkpoint molecule, e.g., PD-1, PD-L1, CTLA4, TIM3, CEACAM (e.g., CEACAM-1, CEACAM-3 and/or CEACAM-5), LAGS, VISTA, BTLA, TIGIT, LAIR1, CD160, 2B4, CD80, CD86, B7-H3 (CD276), B7-H4 (VTCN1), HVEM (TNFRSF14 or CD270), KIR, A2aR, MHC class I, MHC class II, GALS, adenosine, or TGF beta. In embodiments, the additional agent is an inhibitor of PD-L1, e.g., FAZ053 (a hIgG4 humanized anti-PD-L1 monoclonal antibody), MPDL3280A, durvalumab (DEMI-4736), avelumab (MSB-0010718C), or BMS-936559. In embodiments, the additional agent is an additional inhibitor of PD-1, e.g., pembrolizumab, nivolumab, PDR001, MEDI-0680 (AMP-514), AMP-224, REGN-2810, or BGB-A317. In embodiments, the additional agent is an inhibitor of CTLA-4, e.g., ipilimumab. In embodiments, the additional agent is an inhibitor of LAG-3, e.g., LAG525 (a hIgG4 humanized anti-LAG-3 monoclonal antibody). In embodiments, the additional agent is an inhibitor of TIM-3, e.g., MBG453 (a hIgG4 humanized anti-TIM-3 monoclonal antibody). In embodiments, the additional agent is an inhibitor of the enzyme, B-Raf, e.g., dabrafenib (GSK2118436; N-{3-[5-(2-aminopyrimidin-4-yl)-2-tert-butyl-1,3-thiazol-4-yl]-2-fluorophenyl}-2,6-difluorobenzenesulfonamide). In embodiments, the additional agent is an inhibitor of MEK1 and/or MEK2, e.g., trametinib (N-(3-{3-Cyclopropyl-5-[(2-fluoro-4-iodophenyl)amino]-6,8-dimethyl-2,4,7-trioxo-3,4,6,7-tetrahydropyrido[4,3-d]pyrimidin-1(2H)-yl}phenyl)acetamide). In embodiments, the additional agent comprises dabrafenib and trametinib. In embodiments, the additional agent is an inhibitor of GITR, e.g., GWN323. In embodiments, the additional agent is an agonist of STING (Stimulator of Interferon Genes), e.g., MIW815. In embodiments, the additional agent is an IL-15 agonist, e.g., NIZ985. In embodiments, the additional agent an inhibitor of adenosine receptor, e.g., NIR178. In embodiments, the additional agent is an inhibitor of macrophage colony stimulating factor (CSF-1), e.g., MCS110. In embodiments, the additional agent is an inhibitor of cMet, e.g., INC280. In embodiments, the additional agent is an inhibitor of porcupine (PORCN), e.g., WNT974. In embodiments, the additional agent is a histone deacetylase inhibitor, e.g., panobinost. In embodiments, the additional agent is an mTOR inhibitor, e.g., everolimus. In embodiments, the additional agent is a second mitochondrial-derived activator of caspases (SMAC) mimetic and/or an inhibitor of IAP (inhibiotor of apoptosis protein) family of proteins, e.g., LCL161. In embodiments, the additional agent is an inhibitor epidermal growth factor receptor (EGFR), e.g., EGF816. In embodiments, the additional agent is an inhibitor of IL-17, e.g., CJM112. In embodiments, the additional agent is an inhibitor of IL-lbeta, e.g., ILARIS.

[1011] In one embodiment, the agent which enhances activity of a CAR-expressing cell described herein is miR-17-92.

[1012] In one embodiment, the agent which enhances activity of a CAR-described herein is a cytokine. Cytokines have important functions related to T cell expansion, differentiation, survival, and homeostatis. Cytokines that can be administered to the subject receiving a CAR-expressing cell described herein include: IL-2, IL-4, IL-7, IL-9, IL-15, IL-18, and IL-21, or a combination thereof. In preferred embodiments, the cytokine administered is IL-7, IL-15, or IL-21, or a combination thereof. The cytokine can be administered once a day or more than once a day, e.g., twice a day, three times a day, or four times a day. The cytokine can be administered for more than one day, e.g. the cytokine is administered for 2 days, 3 days, 4 days, 5 days, 6 days, 1 week, 2 weeks, 3 weeks, or 4 weeks. For example, the cytokine is administered once a day for 7 days.

[1013] In embodiments, the cytokine is administered in combination with the combination described herein, e.g., a CAR-expressing cell (e.g., CD19 CAR-expressing cell) and a PD-1 inhibitor. The cytokine can be administered simultaneously or concurrently with the CAR-expressing cells, e.g., administered on the same day. The cytokine may be prepared in the same pharmaceutical composition as the CAR-expressing cells, or may be prepared in a separate pharmaceutical composition. Alternatively, the cytokine can be administered shortly after administration of the CAR-expressing cells, e.g., 1 day, 2 days, 3 days, 4 days, 5 days, 6 days, or 7 days after administration of the CAR-expressing T cells. In embodiments where the cytokine is administered in a dosing regimen that occurs over more than one day, the first day of the cytokine dosing regimen can be on the same day as administration with the CAR-expressing cells, or the first day of the cytokine dosing regimen can be 1 day, 2 days, 3 days, 4 days, 5 days, 6 days, or 7 days after administration of the CAR-expressing cells. In one embodiment, on the first day, the CAR-expressing cells are administered to the subject, and on the second day, a cytokine is administered once a day for the next 7 days. In a preferred embodiment, the cytokine to be administered in combination with CAR-expressing cells is IL-7, IL-15, or IL-21.

[1014] In other embodiments, the cytokine is administered a period of time after administration of CAR-expressing cells, e.g., at least 2 weeks, 3 weeks, 4 weeks, 6 weeks, 8 weeks, 10 weeks, 12 weeks, 4 months, 5 months, 6 months, 7 months, 8 months, 9 months, 10 months, 11 months, or 1 year or more after administration of CAR-expressing cells. In one embodiment, the cytokine is administered after assessment of the subject's response to the CAR-expressing cells. For example, the subject is administered CAR-expressing cells according to the dosage and regimens described herein. The response of the subject to CART therapy is assessed at 2 weeks, 3 weeks, 4 weeks, 6 weeks, 8 weeks, 10 weeks, 12 weeks, 4 months, 5 months, 6 months, 7 months, 8 months, 9 months, 10 months, 11 months, or 1 year or more after administration of CAR-expressing cells, using any of the methods described herein, including inhibition of tumor growth, reduction of circulating tumor cells, or tumor regression. Subjects that do not exhibit a sufficient response to CAR-expressing cell therapy can be administered a cytokine. Administration of the cytokine to the subject that has sub-optimal response to the CAR-expressing cell therapy improves CAR-expressing cell efficacy or anti-tumor activity. In a preferred embodiment, the cytokine administered after administration of CAR-expressing cells is IL-7.

Combination with a Low Dose of an mTOR Inhibitor

[1015] In one embodiment, the combination described herein, e.g., a CAR-expressing cell (e.g., CD19 CAR-expressing cell) and a PD-1 inhibitor, is administered in combination with a low, immune enhancing dose of an mTOR inhibitor.

[1016] In another embodiment, administration of a low, immune enhancing, dose of an mTOR inhibitor results in increased or prolonged proliferation of CAR-expressing cells, e.g., in culture or in a subject, e.g., as compared to non-treated CAR-expressing cells or a non-treated subject. In embodiments, increased proliferation is associated with in an increase in the number of CAR-expressing cells. Methods for measuring increased or prolonged proliferation are described in the Examples herein. In another embodiment, administration of a low, immune enhancing, dose of an mTOR inhibitor results in increased killing of cancer cells by CAR-expressing cells, e.g., in culture or in a subject, e.g., as compared to non-treated CAR-expressing cells or a non-treated subject. In embodiments, increased killing of cancer cells is associated with in a decrease in tumor volume.

[1017] In one embodiment, the cells expressing a CAR molecule, e.g., a CAR molecule described herein, are administered in combination with a low, immune enhancing dose of an mTOR inhibitor, e.g., an allosteric mTOR inhibitor, e.g., RAD001, or a catalytic mTOR inhibitor. For example, administration of the low, immune enhancing, dose of the mTOR inhibitor can be initiated prior to administration of a CAR-expressing cell described herein; completed prior to administration of a CAR-expressing cell described herein; initiated at the same time as administration of a CAR-expressing cell described herein; overlapping with administration of a CAR-expressing cell described herein; or continuing after administration of a CAR-expressing cell described herein.

[1018] Alternatively or in addition, administration of a low, immune enhancing, dose of an mTOR inhibitor can optimize immune effector cells to be engineered to express a CAR molecule described herein. In such embodiments, administration of a low, immune enhancing, dose of an mTOR inhibitor, e.g., an allosteric inhibitor, e.g., RAD001, or a catalytic inhibitor, is initiated or completed prior to harvest of immune effector cells, e.g., T cells or NK cells, to be engineered to express a CAR molecule described herein, from a subject.

[1019] In another embodiment, immune effector cells, e.g., T cells or NK cells, to be engineered to express a CAR molecule described herein, e.g., after harvest from a subject, or CAR-expressing immune effector cells, e.g., T cells or NK cells, e.g., prior to administration to a subject, can be cultured in the presence of a low, immune enhancing, dose of an mTOR inhibitor.

[1020] As used herein, the term “mTOR inhibitor” refers to a compound or ligand, or a pharmaceutically acceptable salt thereof, which inhibits the mTOR kinase in a cell. In an embodiment an mTOR inhibitor is an allosteric inhibitor. In an embodiment an mTOR inhibitor is a catalytic inhibitor.

[1021] Allosteric mTOR inhibitors include the neutral tricyclic compound rapamycin (sirolimus), rapamycin-related compounds, that is compounds having structural and functional similarity to rapamycin including, e.g., rapamycin derivatives, rapamycin analogs (also referred to as rapalogs) and other macrolide compounds that inhibit mTOR activity.

[1022] Rapamycin is a known macrolide antibiotic produced by Streptomyces hygroscopicus. Other suitable rapamycin analogs include, but are not limited to, RAD001, otherwise known as everolimus (Afinitor®), has the chemical name (1R,9S,12S,15R,16E,18R,19R,21R,23S,24E,26E,28E,30S,32S,35R)-1,18-dihydroxy-12-{(1R)-2-[(1S,3R,4R)-4-(2-hydroxyethoxy)-3-methoxycyclohexyl]-1-methylethyl}-19,30-dimethoxy-15,17,21,23,29,35-hexamethyl-11,36-dioxa-4-aza-tricyclo[30.3.1.04,9]hexatriaconta-16,24,26,28-tetraene-2,3,10,14,20-pentaone,sirolimus (rapamycin, AY-22989), 40-[3-hydroxy-2-(hydroxymethyl)-2-methylpropanoate]-rapamycin (also called temsirolimus or CCI-779) and ridaforolimus (AP-23573/MK-8669).b Other examples of allosteric mTor inhibtors include zotarolimus (ABT578) and umirolimus as described in US2005/0101624 the contents of which are incorporated by reference. Other suitable mTOR inhibitors are described in paragraphs 946 to 964 of International Publication WO2015/142675, filed March 13, 2015, which is incorporated by reference in its entirety. Low, immune enhancing doses of an mTOR inhibitor, suitable levels of mTOR inhibition associated with low doses of an mTOR inhibitor, methods for detecting the level of mTOR inhibition, and suitable pharmaceutical compositions thereof are further described in paragraphs 936 to 945 and 965 to 1003 of International Publication WO2015/142675, filed March 13, 2015, which is incorporated by reference in its entirety.

### Cytokine Release Syndrome (CRS)

[1023] Cytokine release syndrome (CRS) is a potentially life-threatening cytokine-associated toxicity that can occur as a result of cancer immunotherapy, e.g., cancer antibody therapies or T cell immunotherapies (e.g., CAR T cells). CRS results from high-level immune activation when large numbers of lymphocytes and/or myeloid cells release inflammatory cytokines upon activation. The severity of CRS and the timing of onset of symptoms can vary depending on the magnitude of immune cell activation, the type of therapy administered, and/or the extent of tumor burden in a subject. In the case of T-cell therapy for cancer, symptom onset is typically days to weeks after administration of the T-cell therapy, e.g., when there is peak in vivo T-cell expansion. See, e.g., Lee et al. Blood. 124.2(2014): 188-95.

[1024] Symptoms of CRS can include neurologic toxicity, disseminated intravascular coagulation, cardiac dysfunction, adult respiratory distress syndrome, renal failure, and/or hepatic failure. For example, symptoms of CRS include high fevers, nausea, transient hypotension, hypoxia, and the like. CRS may include clinical constitutional signs and symptoms such as fever, fatigue, anorexia, myalgias, arthalgias, nausea, vomiting, and headache. CRS may include clinical skin signs and symptoms such as rash. CRS may include clinical gastrointestinal signs and symsptoms such as nausea, vomiting and diarrhea. CRS may include clinical respiratory signs and symptoms such as tachypnea and hypoxemia. CRS may include clinical cardiovascular signs and symptoms such as tachycardia, widened pulse pressure, hypotension, increased cardac output (early) and potentially diminished cardiac output (late). CRS may include clinical coagulation signs and symptoms such as elevated d-dimer, hypofibrinogenemia with or without bleeding. CRS may include clinical renal signs and symptoms such as azotemia. CRS may include clinical hepatic signs and symptoms such as transaminitis and hyperbilirubinemia. CRS may include clinical neurologic signs and symptoms such as headache, mental status changes, confusion, delirium, word finding difficulty or frank aphasia, hallucinations, tremor, dymetria, altered gait, and seizures.

[1025] IL-6 is thought to be a mediator of CRS toxicity. See, e.g., id. High IL-6 levels may initiate a proinflammatory IL-6 signaling cascade, leading to one or more of the CRS symptoms. In some cases, the level of C-reactive protein (CRP) (a biomolecule produced by the liver, e.g., in response to IL-6) can be a measure of IL-6 activity. In some cases, CRP levels may increase several fold (e.g., several logs) during CRS. CRP levels can be measured using methods described herein, and/or standard methods available in the art.

### CRS Grading

[1026] In some embodiments, CRS can be graded in severity from 1-5 as follows. Grades 1-3 are less than severe CRS. Grades 4-5 are severe CRS. For Grade 1 CRS, only symptomatic treatment is needed (e.g., nausea, fever, fatigue, myalgias, malaise, headache) and symptoms are not life threatening. For Grade 2 CRS, the symptoms require moderate intervention and generally respond to moderate intervention. Subjects having Grade 2 CRS develop hypotension that is responsive to either fluids or one low-dose vasopressor; or they develop grade 2 organ toxicity or mild respiratory symptoms that are responsive to low flow oxygen (<40% oxygen). In Grade 3 CRS subjects, hypotension generally cannot be reversed by fluid therapy or one low-dose vasopressor. These subjects generally require more than low flow oxygen and have grade 3 organ toxicity (e.g., renal or cardiac dysfunction or coagulopathy) and/or grade 4 transaminitis. Grade 3 CRS subjects require more aggressive intervention, e.g., oxygen of 40% or higher, high dose vasopressor(s), and/or multiple vasopressors. Grade 4 CRS subjects suffer from immediately life-threatening symptoms, including grade 4 organ toxicity or a need for mechanical ventilation. Grade 4 CRS subjects generally do not have transaminitis. In Grade 5 CRS subjects, the toxicity causes death. For example, criteria for grading CRS is provided herein as Table A. Unless otherwise specified, CRS as used herein refers to CRS according to the criteria of Table A.

TABLE A
CRS grading

| | |
|---|---|
| Gr1 | Supportive care only |
| Gr2 | IV therapies +/− hospitalization. |
| Gr3 | Hypotension requiring IV fluids or low-dose vasoactives or |
| | hypoxemia requiring oxygen, CPAP, or BIPAP. |
| Gr4 | Hypotension requiring high-dose vasoactives or hypoxemia |
| | requiring mechanical ventilation. |
| Gr 5 | Death |

### CRS Therapies

[1027] Therapies for CRS include IL-6 inhibitor or IL-6 receptor (IL-6R) inhibitors (e.g., tocilizumab or siltuximab), sgp130 blockers, vasoactive medications, corticosteroids, immunosuppressive agents, and mechanical ventilation. Exemplary therapies for CRS are described in International Application WO2014011984, which is hereby incorporated by reference.

[1028] Tocilizumab is a humanized, immunoglobulin Glkappa anti-human IL-6R monoclonal antibody. See, e.g., id. Tocilizumab blocks binding of IL-6 to soluble and membrane bound IL-6 receptors (IL-6Rs) and thus inhibitos classical and trans-IL-6 signaling. In embodiments, tocilizumab is administered at a dose of about 4-12 mg/kg, e.g., about 4-8 mg/kg for adults and about 8-12 mg/kg for pediatric subjects, e.g., administered over the course of 1 hour.

[1029] In some embodiments, the CRS therapeutic is an inhibitor of IL-6 signalling, e.g., an inhibitor of IL-6 or IL-6 receptor. In one embodiment, the inhibitor is an anti-IL-6 antibody, e.g., an anti-IL-6 chimeric monoclonal antibody such as siltuximab. In other embodiments, the inhibitor comprises a soluble gp130 or a fragment thereof that is capable of blocking IL-6 signalling. In some embodiments, the sgp130 or fragment thereof is fused to a heterologous domain, e.g., an Fc domain, e.g., is a gp130-Fc fusion protein such as FE301. In embodiments, the inhibitor of IL-6 signalling comprises an antibody, e.g., an antibody to the IL-6 receptor, such as sarilumab, olokizumab (CDP6038), elsilimomab, sirukumab (CNTO 136), ALD518/BMS-945429, ARGX-109, or FM101. In some embodiments, the inhibitor of IL-6 signalling comprises a small molecule such as CPSI-2364.

[1030] Exemplary vasoactive medications include but are not limited to angiotensin-11, endothelin-1, alpha adrenergic agonists, rostanoids, phosphodiesterase inhibitors, endothelin antagonists, inotropes (e.g., adrenaline, dobutamine, isoprenaline, ephedrine), vasopressors (e.g., noradrenaline, vasopressin, metaraminol, vasopressin, methylene blue), inodilators (e.g., milrinone, levosimendan), and dopamine.

[1031] Exemplary vasopressors include but are not limited to norepinephrine, dopamine, phenylephrine, epinephrine, and vasopressin. In some embodiments, a high-dose vasopressor includes one or more of the following: norpepinephrine monotherapy at ≥20 ug/min, dopamine monotherapy at ≥10 ug/kg/min, phenylephrine monotherapy at ≥200 ug/min, and/or epinephrine monotherapy at ≥10 ug/min. In some embodiments, if the subject is on vasopres sin, a high-dose vasopressor includes vasopressin+norepinephrine equivalent of ≥10 ug/min, where the norepinephrine equivalent dose=[norepinephrine (ug/min)]+[dopamine (ug/kg/min)/2]+[epinephrine (ug/min)]+[phenylephrine (ug/min)/10]. In some embodiments, if the subject is on combination vasopressors (not vasopressin), a high-dose vasopressor includes norepinephrine equivalent of >20 ug/min, where the norepinephrine equivalent dose=[norepinephrine (ug/min)]+[dopamine (ug/kg/min)/2]+[epinephrine (ug/min)]+[phenylephrine (ug/min)/10]. See e.g., Id.

[1032] In some embodiments, a low-dose vasopressor is a vasopressor administered at a dose less than one or more of the doses listed above for high-dose vasopressors.

[1033] Exemplary corticosteroids include but are not limited to dexamethasone, hydrocortisone, and methylprednisolone. In embodiments, a dose of dexamethasone of 0.5 mg/kg is used. In embodiments, a maximum dose of dexamethasone of 10 mg/dose is used. In embodiments, a dose of methylprednisolone of 2 mg/kg/day is used.

[1034] Exemplary immunosuppressive agents include but are not limited to an inhibitor of TNFα or an inhibitor of IL-1. In embodiments, an inhibitor of TNFα comprises an anti-TNFα antibody, e.g., monoclonal antibody, e.g., infliximab. In embodiments, an inhibitor of TNFα comprises a soluble TNFα receptor (e.g., etanercept). In embodiments, an IL-1 or IL-1R inhibitor comprises anakinra.

[1035] In some embodiments, the subject at risk of developing severe CRS is administered an anti-IFN-gamma or anti-sIL2Ra therapy, e.g., an antibody molecule directed against IFN-gamma or sIL2Ra.

[1036] In embodiments, for a subject who has received a therapeutic antibody molecule such as blinatumomab and who has CRS or is at risk of developing CRS, the therapeutic antibody molecule is administered at a lower dose and/or a lower frequency, or administration of the therapeutic antibody molecule is halted.

[1037] In embodiments, a subject who has CRS or is at risk of developing CRS is treated with a fever reducing medication such as acetaminophen.

[1038] In embodiments, a subject herein is administered or provided one or more therapies for CRS described herein, e.g., one or more of IL-6 inhibitors or IL-6 receptor (IL-6R) inhibitors (e.g., tocilizumab), vasoactive medications, corticosteroids, immunosuppressive agents, or mechanical ventilation, in any combination, e.g., in combination with a CAR-expressing cell described herein.

[1039] In embodiments, a subject at risk of developing CRS (e.g., severe CRS) (e.g., identified as having a high risk status for developing severe CRS) is administered one or more therapies for CRS described herein, e.g., one or more of IL-6 inhibitor or IL-6 receptor (IL-6R) inhibitors (e.g., tocilizumab), vasoactive medications, corticosteroids, immunosuppressive agents, or mechanical ventilation, in any combination, e.g., in combination with a CAR-expressing cell described herein.

[1040] In embodiments, a subject herein (e.g., a subject at risk of developing severe CRS or a subject identified as at risk of developing severe CRS) is transferred to an intensive care unit. In some embodiments, a subject herein (e.g., a subject at risk of developing severe CRS or a subject identified as at risk of developing severe CRS) is monitored for one ore more symptoms or conditions associated with CRS, such as fever, elevated heart rate, coagulopathy, MODS (multiple organ dysfunction syndrome), cardiovascular dysfunction, distributive shock, cardiomyopathy, hepatic dysfunction, renal dysfunction, encephalopathy, clinical seizures, respiratory failure, or tachycardia. In some embodiments, the methods herein comprise administering a therapy for one of the symptoms or conditions associated with CRS. For instance, in embodiments, e.g., if the subject develops coagulopathy, the method comprises administering cryoprecipitate. In some embodiments, e.g., if the subject develops cardiovascular dysfunction, the method comprises administering vasoactive infusion support. In some embodiments, e.g., if the subject develops distributive shock, the method comprises administering alpha-agonist therapy. In some embodiments, e.g., if the subject develops cardiomyopathy, the method comprises administering milrinone therapy. In some embodiments, e.g., if the subject develops respiratory failure, the method comprises performing mechanical ventilation (e.g., invasive mechanical ventilation or noninvasive mechanical ventilation). In some embodiments, e.g., if the subject develops shock, the method comprises administering crystalloid and/or colloid fluids.

[1041] In embodiments, the CAR-expressing cell is administered prior to, concurrently with, or subsequent to administration of one or more therapies for CRS described herein, e.g., one or more of IL-6 inhibitor or IL-6 receptor (IL-6R) inhibitors (e.g., tocilizumab), vasoactive medications, corticosteroids, immunosuppressive agents, or mechanical ventilation. In embodiments, the CAR-expressing cell is administered within 2 weeks (e.g., within 2 or 1 week, or within 14 days, e.g., within 14, 13, 12, 11, 10, 9, 8, 7, 6, 5, 4, 3, 2, 1 day or less) of administration of one or more therapies for CRS described herein, e.g., one or more of IL-6 inhibitors or IL-6 receptor (IL-6R) inhibitors (e.g., tocilizumab), vasoactive medications, corticosteroids, immunosuppressive agents, or mechanical ventilation. In embodiments, the CAR-expressing cell is administered at least 1 day (e.g., at least 1, 2, 3, 4, 5, 6, 7, 8, 9, 10, 11, 12, 13, 14, 15, 16, 17, 18, 19, 20, 1, week, 2 weeks, 3 weeks, 4 weeks, 1 month, 2 months, 3 months, 3 months, or more) before or after administration of one or more therapies for CRS described herein, e.g., one or more of IL-6 inhibitors or IL-6 receptor (IL-6R) inhibitors (e.g., tocilizumab), vasoactive medications, corticosteroids, immunosuppressive agents, or mechanical ventilation.

[1042] In embodiments, a subject herein (e.g., a subject at risk of developing severe CRS or a subject identified as at risk of developing severe CRS) is administered a single dose of an IL-6 inhibitor or IL-6 receptor (IL-6R) inhibitor (e.g., tocilizumab). In embodiments, the subject is administered a plurality of doses (e.g., 2, 3, 4, 5, 6, or more doses) of an IL-6 inhibitor or IL-6 receptor (IL-6R) inhibitor (e.g., tocilizumab).

[1043] In embodiments, a subject at low or no risk of developing CRS (e.g., severe CRS) (e.g., identified as having a low risk status for developing severe CRS) is not administered a therapy for CRS described herein, e.g., one or more of IL-6 inhibitor or IL-6 receptor (IL-6R) inhibitors (e.g., tocilizumab), vasoactive medications, corticosteroids, immunosuppressive agents, or mechanical ventilation.

[1044] In some embodiments, the subject treated by the methods disclosed herein has a low severity of CRS, e.g., grade 1, grade 2 or grade 3.

### Pharmaceutical Compositions

[1045] Pharmaceutical compositions of the present invention may comprise a CAR-expressing cell, e.g., a plurality of CAR-expressing cells, as described herein, in combination with one or more pharmaceutically or physiologically acceptable carriers, diluents or excipients. Such compositions may comprise buffers such as neutral buffered saline, phosphate buffered saline and the like; carbohydrates such as glucose, mannose, sucrose or dextrans, mannitol; proteins; polypeptides or amino acids such as glycine; antioxidants; chelating agents such as EDTA or glutathione; adjuvants (e.g., aluminum hydroxide); and preservatives. Compositions of the present invention are in one aspect formulated for intravenous administration.

[1046] Pharmaceutical compositions of the present invention may be administered in a manner appropriate to the disease to be treated (or prevented). The quantity and frequency of administration will be determined by such factors as the condition of the patient, and the type and severity of the patient's disease, although appropriate dosages may be determined by clinical trials.

[1047] In one embodiment, the pharmaceutical composition is substantially free of, e.g., there are no detectable levels of a contaminant, e.g., selected from the group consisting of endotoxin, mycoplasma, replication competent lentivirus (RCL), p24, VSV-G nucleic acid, HIV gag, residual anti-CD3/anti-CD28 coated beads, mouse antibodies, pooled human serum, bovine serum albumin, bovine serum, culture media components, vector packaging cell or plasmid components, a bacterium and a fungus. In one embodiment, the bacterium is at least one selected from the group consisting of Alcaligenes faecalis, Candida albicans, Escherichia coli, Haemophilus influenza, Neisseria meningitides, Pseudomonas aeruginosa, Staphylococcus aureus, Streptococcus pneumonia, and Streptococcus pyogenes group A.

### Methods of Treating

[1048] When “an immunologically effective amount,” “an effective dose”, “an anti-cancer effective amount,” “a cancer-inhibiting effective amount,” or “therapeutic amount” is indicated, the precise amount of the compositions of the present invention to be administered can be determined by a physician with consideration of individual differences in age, weight, tumor size, extent of infection or metastasis, and condition of the patient (subject).

[1049] The dosage of the above treatments to be administered to a subject will vary with the precise nature of the condition being treated and the recipient of the treatment. The scaling of dosages for human administration can be performed according to art-accepted practices. The dose for CAMPATH, for example, will generally be in the range 1 to about 100 mg for an adult patient, usually administered daily for a period between 1 and 30 days. The preferred daily dose is 1 to 10 mg per day although in some instances larger doses of up to 40 mg per day may be used (described in U.S. Pat. No. 6,120,766).

[1050] The administration of the compositions described herein may be carried out in any convenient manner, including by aerosol inhalation, injection, ingestion, transfusion, implantation or transplantation. The compositions described herein may be administered to a patient transarterially, subcutaneously, intradermally, intratumorally, intranodally, intramedullary, intramuscularly, by intravenous (i.v.) injection, or intraperitoneally. In one embodiment, the compositions described herein, e.g., comprising a CAR-expressing cell and/or PD-1 inhibitor, are administered to a patient by intradermal or subcutaneous injection. In one embodiment, the the compositions described herein, e.g., comprising a CAR-expressing cell and/or PD-1 inhibitor, are administered by i.v. injection. The the compositions described herein, e.g., comprising a CAR-expressing cell and/or PD-1 inhibitor, may be injected directly into a tumor, lymph node, or site of infection.

[1051] It can generally be stated that a pharmaceutical composition comprising the immune effector cells described herein may be administered at a dosage of 10⁴ to 10⁹ cells/kg body weight, in some instances 10⁵ to 10⁶ cells/kg body weight, including all integer values within those ranges. The immune effector cell compositions may also be administered multiple times at these dosages. The cells can be administered by using infusion techniques that are commonly known in immunotherapy (see, e.g., Rosenberg et al., New Eng. J. of Med. 319:1676, 1988).

[1052] In certain aspects, it may be desired to administer activated immune effector cells to a subject and then subsequently redraw blood (or have an apheresis performed), activate the cells therefrom according to the present invention, and reinfuse the patient with these activated and expanded cells. This process can be carried out multiple times every few weeks. In certain aspects, the cells can be activated from blood draws of from 10 cc to 400 cc. In certain aspects, the cells are activated from blood draws of 20 cc, 30 cc, 40 cc, 50 cc, 60 cc, 70 cc, 80 cc, 90 cc, or 100 cc.

[1053] In a particular exemplary aspect, subjects may undergo leukapheresis, wherein leukocytes are collected, enriched, or depleted ex vivo to select and/or isolate the cells of interest, e.g., T cells. These T cell isolates may be expanded by methods known in the art and treated such that one or more CAR constructs of the invention may be introduced, thereby creating a CAR T cell of the invention. Subjects in need thereof may subsequently undergo standard treatment with high dose chemotherapy followed by peripheral blood stem cell transplantation. In certain aspects, following or concurrent with the transplant, subjects receive an infusion of the expanded CAR expressing cells of the present invention. In an additional aspect, expanded cells are administered before or following surgery.

[1054] In one embodiment, the CAR is introduced into immune effector cells, e.g., using in vitro transcription, and the subject (e.g., human) receives an initial administration of CAR-expressing cells of the invention, and one or more subsequent administrations of the CAR-expressing cells of the invention, wherein the one or more subsequent administrations are administered less than 15 days, e.g., 14, 13, 12, 11, 10, 9, 8, 7, 6, 5, 4, 3, or 2 days after the previous administration. In one embodiment, more than one administration of the CAR-expressing cells of the invention are administered to the subject (e.g., human) per week, e.g., 2, 3, or 4 administrations of the CAR-expressing cells of the invention are administered per week. In one embodiment, the subject (e.g., human subject) receives more than one administration of the CAR-expressing cells per week (e.g., 2, 3 or 4 administrations per week) (also referred to herein as a cycle), followed by a week of no CAR-expressing cells administration, and then one or more additional administration of the CAR-expressing cells (e.g., more than one administration of the CAR-expressing cells per week) is administered to the subject. In another embodiment, the subject (e.g., human subject) receives more than one cycle of CAR-expressing cells, and the time between each cycle is less than 10, 9, 8, 7, 6, 5, 4, or 3 days. In one embodiment, the CAR-expressing cells are administered every other day for 3 administrations per week. In one embodiment, the CAR-expressing cells of the invention are administered for at least two, three, four, five, six, seven, eight or more weeks.

[1055] In some embodiments, a dose of CAR-expressing cells (e.g., CAR-expressing cells described herein, e.g., CD19 CAR-expressing cells described herein) comprises about 10⁴ to about 10⁹ cells/kg, e.g., about 10⁴ to about 10⁵ cells/kg, about 10⁵ to about 10⁶ cells/kg, about 10⁶ to about 10⁷ cells/kg, about 10⁷ to about 10⁸ cells/kg, or about 10⁸ to about 10⁹ cells/kg. In embodiments, the dose of CAR-expressing cells comprises about 0.6×10⁶ cells/kg to about 2×10⁷ cells/kg. In some embodiments, a dose of CAR-expressing cells described herein (e.g., CD19 CAR-expressing cell) comprises about 2×10⁵, 1×10⁶, 1.1×10⁶, 2×10⁶, 3×10⁶, 3.6×10⁶, 5×10⁶, 1×10⁷, 1.8×10⁷, 2×10⁷, 5×10⁷, 1×10⁸, 2×10⁸, 3×10⁸, or 5×10⁸ cells/kg. In some embodiments, a dose of CAR cells (e.g., CD19 CAR-expressing cell) comprises at least about 1×10⁶, 1.1×10⁶, 2×10⁶, 3.6×10⁶, 5×10⁶, 1×10⁷, 1.8×10⁷, 2×10⁷, 5×10⁷, 1×10⁸, 2×10⁸, 3×10⁸, or 5×10⁸ cells/kg. In some embodiments, a dose of CAR cells (e.g., CD19 CAR-expressing cell) comprises up to about 1×10⁶, 1.1×10⁶, 2×10⁶, 3.6×10⁶, 5×10⁶, 1×10⁷, 1.8×10⁷, 2×10⁷, 5×10⁷, 1×10⁸, 2×10⁸, 3×10⁸, or 5×10⁸ cells/kg. In some embodiments, a dose of CAR cells (e.g., CD19 CAR-expressing cell) comprises about 1.1×10⁶-1.8×10⁷ cells/kg. In some embodiments, a dose of CAR cells (e.g., CD19 CAR-expressing cell) comprises about 1×10⁷, 2×10⁷, 5×10⁷, 1×10⁸, 2×10⁸, 3×10⁸, 5×10⁸, 1×10⁹, 2×10⁹, or 5×10⁹ cells. In some embodiments, a dose of CAR cells (e.g., e.g., CD19 CAR-expressing cell) comprises at least about 1×10⁷, 2×10⁷, 5×10⁷, 1×10⁸, 2×10⁸, 3×10⁸, 5×10⁸, 1×10⁹, 2×10⁹, or 5×10⁹ cells. In some embodiments, a dose of CAR cells (e.g., e.g., CD19 CAR-expressing cell) comprises up to about 1×10⁷, 2×10⁷, 5×10⁷, 1×10⁸, 2×10⁸, 3×10⁸, 5×10⁸, 1×10⁹, 2×10⁹, or 5×10⁹ cells.

[1056] In some embodiments, a dose of CAR cells (e.g., CD19 CAR-expressing cell) comprises up to about 1×10⁷, 1.5×10⁷, 2×10⁷, 2.5×10⁷, 3×10⁷, 3.5×10⁷, 4×10⁷, 5×10⁷, 1×10⁸, 1.5×10⁸, 2×10⁸, 2.5×10⁸, 3×10⁸, 3.5×10⁸, 4×10⁸, 5×10⁸, 1×10⁹, 2×10⁹, or 5×10⁹ cells. In some embodiments, a dose of CAR cells (e.g., CD19 CAR-expressing cell) comprises up to about 1-3×10⁷ to 1-3 ×10⁸. In some embodiments, the subject is administered about 1-3×10⁷ of CD19 CAR-expressing cells. In other embodiments, the subject is administered about 1-3×10⁸ of CD19 CAR-expressing cells.

[1057] In some embodiments, a dose of CAR-expressing cells (e.g., CAR-expressing cells described herein, e.g., CD19 CAR-expressing cells described herein) comprises about 1×10⁶ cells/m² to about 1×10⁹ cells/m², e.g., about 1×10⁷ cells/m² to about 5×10⁸ cells/m², e.g., about 1.5×10⁷ cells/m², about 2×10⁷ cells/m², about 4.5×10⁷ cells/m², about 10⁸ cells/m², about 1.2×10⁸ cells/m², or about 2×10⁸ cells/m².

[1058] In embodiments, the CD19 CAR-expressing cells are administered in a plurality of doses, e.g., a first dose, a second dose, and optionally a third dose. In embodiments, the method comprises treating a subject (e.g., an adult subject) having a cancer (e.g., acute lymphoid leukemia (ALL)), comprising administering to the subject a first dose, a second dose, and optionally one or more additional doses, each dose comprising immune effector cells expressing a CAR molecule, e.g., a CD19 CAR molecule, e.g., a CAR molecule according to SEQ ID NO: 108.

[1059] In embodiments, the method comprises administering a dose of 2-5×10⁶ viable CAR-expressing cells/kg, wherein the subject has a body mass of less than 50 kg; or administering a dose of 1.0 -2.5 ×10⁸ viable CAR-expressing cells, wherein the subject has a body mass of at least 50 kg.

[1060] In embodiments, a single dose is administered to the subject, e.g., pediatric subject.

[1061] In embodiments, the doses are administered on sequential days, e.g., the first dose is administered on day 1, the second dose is administered on day 2, and the optional third dose (if administered) is administered on day 3.

[1062] In embodiments, a fourth, fifth, or sixth dose, or more doses, are administered.

[1063] In embodiments, the first dose comprises about 10% of the total dose, the second dose comprises about 30% of the total dose, and the third dose comprises about 60% of the total dose, wherein the aforementioned percentages have a sum of 100%. In embodiments, the first dose comprises about 9-11%, 8-12%, 7-13%, or 5-15% of the total dose. In embodiments, the second dose comprises about 29-31%, 28-32%, 27-33%, 26-34%, 25-35%, 24-36%, 23-37%, 22-38%, 21-39%, or 20-40% of the total dose. In embodiments, the third dose comprises about 55-65%, 50-70%, 45-75%, or 40-80% of the total dose. In embodiments, the total dose refers to the total number of viable CAR-expressing cells administered over the course of 1 week, 2 weeks, 3 weeks, or 4 weeks. In some embodiments wherein two doses are administered, the total dose refers to the sum of the number of viable CAR-expressing cells administered to the subject in the first and second doses. In some embodiments wherein three doses are administered, the total dose refers to the sum of the number of viable CAR-expressing cells administered to the subject in the first, second, and third doses.

[1064] In embodiments, the dose is measured according to the number of viable CAR-expressing cells therein. CAR expression can be measured, e.g., by flow cytometry using an antibody molecule that binds the CAR molecule and a detectable label. Viability can be measured, e.g., by Cellometer.

[1065] In embodiments, the viable CAR-expressing cells are administered in ascending doses. In embodiments, the second dose is larger than the first dose, e.g., larger by 10%, 20%, 30%, or 50%. In embodiments, the second dose is twice, three times, four times, or five times the size of the first dose. In embodiments, the third dose is larger than the second dose, e.g., larger by 10%, 20%, 30%, or 50%. In embodiments, the third dose is twice, three times, four times, or five times the size of the second dose.

[1066] In certain embodiments, the method includes one, two, three, four, five, six, seven or all of a)-h) of the following:

[1067] a) the number of CAR-expressing, viable cells administered in the first dose is no more than 1/3, of the number of CAR-expressing, viable cells administered in the second dose;

[1068] b) the number of CAR-expressing, viable cells administered in the first dose is no more than 1/X, wherein X is 2, 3, 4, 5, 6, 7, 8, 9, 10, 15, 20, 30, 40 or 50, of the total number of CAR-expressing, viable cells administered;

[1069] c) the number of CAR-expressing, viable cells administered in the first dose is no more than 1×10⁷, 2×10⁷, 3×10⁷, 4×10⁷, 5×10⁷, 6×10⁷, 7×10⁷, 8×10⁷, 9×10⁷, 1×10⁸, 2×10⁸, 3×10⁸, 4×10⁸, or 5×10⁸ CAR-expressing, viable cells, and the second dose is greater than the first dose;

[1070] d) the number of CAR-expressing, viable cells administered in the second dose is no more than 1/2, of the number of CAR-expressing, viable cells administered in the third dose;

[1071] e) the number of CAR-expressing, viable cells administered in the second dose is no more than 1/Y, wherein Y is 2, 3, 4, 5, 6, 7, 8, 9, 10, 15, 20, 30, 40 or 50, of the total number of CAR-expressing, viable cells administered;

[1072] f) the number of CAR-expressing, viable cells administered in the second dose is no more than 1×10⁷, 2×10⁷, 3×10⁷, 4×10⁷, 5×10⁷, 6×10⁷, 7×10⁷, 8×10⁷, 9×10⁷, 1×10⁸, 2×10⁸, 3×10⁸, 4×10⁸, or 5×10⁸ CAR-expressing, viable cells, and the third dose is greater than the second dose;

[1073] h) the dosages and time periods of administration of the first, second, and optionally third doses are selected such that the subject experiences CRS at a level no greater than 4, 3, 2, or 1.

[1074] In embodiments, the total dose is about 5×10⁸ CAR-expressing, viable cells. In embodiments, the total dose is about 5×10⁷-5×10⁸ CAR-expressing, viable cells. In embodiments, the first dose is about 5×10⁷ (e.g., ±10%, 20%, or 30%) CAR-expressing, viable cells, the second dose is about 1.5×10⁸ (e.g., ±10%, 20%, or 30%) CAR-expressing, viable cells, and the third dose is about 3×10⁸ (e.g., ±10%, 20%, or 30%) CAR-expressing, viable cells.

[1075] In embodiments, the subject is evaluated for CRS after receiving a dose, e.g., after receiving the first dose, the second dose, and/or the third dose.

[1076] In embodiments, the subject receives a CRS treatment, e.g., tocilizumab, a corticosteroid, etanercept, or siltuximab. In embodiments, the CRS treatment is administered before or after the first dose of cells comprising the CAR molecule. In embodiments, the CRS treatment is administered before or after the second dose of cells comprising the CAR molecule. In embodiments, the CRS treatment is administered before or after the third dose of cells comprising the CAR molecule. In embodiments, the CRS treatment is administered between the first and second doses of cells comprising the CAR molecule, and/or between the second and third doses of cells comprising the CAR molecule.

[1077] In embodiments, in a subject having CRS after the first dose, e.g., CRS grade 1, 2, 3, or 4, the second dose is administered at least 2, 3, 4, or 5 days after the first dose. In embodiments, in a subject having CRS after the second dose, e.g., CRS grade 1, 2, 3, or 4, the third dose is administered at least 2, 3, 4, or 5 days after the second dose. In embodiments, in a subject having CRS after the first dose, the second dose of CAR-expressing cells is delayed relative to when the second dose would have been administered had the subject not had CRS. In embodiments, in a subject having CRS after the second dose, the third dose of CAR-expressing cells is delayed relative to when the third dose would have been administered had the subject not had CRS.

[1078] In embodiments, the subject has a cancer with a high disease burden before the first dose is administered. In embodiments, the subject has bone marrow blast levels of at least 1%, 2%, 3%, 4%, 5%, 6%, 7%, 8%, 9%, 10%, 15%, 20%, 25%, 30%, 35%, 40%, 45%, or 50%, e.g., at least 5%. In embodiments, the subject has a cancer in stage I, II, III, or IV. In embodiments, the subject has a tumor mass of at least 1, 2, 5, 10, 20, 50, 100, 200, 500, or 1000 g, e.g., in a single tumor or a plurality of tumors.

[1079] In some embodiments, the subject has cancer (e.g., a solid cancer or a hematological cancer as described herein). In an embodiment, the subject has CLL. In embodiments, the subject has ALL. In other embodiments, the subject has multiple myeloma.

[1080] In one embodiment, the cancer is a disease associated with CD19 expression, e.g., as described herein. In other embodiments, the cancer is a disease associated with a tumor antigen, e.g., as described herein. In embodiments, the CAR molecule is a CAR molecule as described herein.

[1081] In one aspect, CAR-expressing cells, e.g., CD19 CAR-expressing cells, are generated using lentiviral viral vectors, such as lentivirus. CAR-expressing cells generated that way will have stable CAR expression.

[1082] In one aspect, the CAR-expressing cells transiently express CAR vectors for 4, 5, 6, 7, 8, 9, 10, 11, 12, 13, 14, 15 days after transduction. Transient expression of CARs can be effected by RNA CAR vector delivery. In one aspect, the CAR RNA is transduced into the T cell by electroporation.

[1083] A potential issue that can arise in patients being treated using transiently expressing CAR-expressing cells (particularly with murine scFv bearing CAR-expressing cells) is anaphylaxis after multiple treatments.

[1084] Without being bound by this theory, it is believed that such an anaphylactic response might be caused by a patient developing humoral anti-CAR response, i.e., anti-CAR antibodies having an anti-IgE isotype. It is thought that a patient's antibody producing cells undergo a class switch from IgG isotype (that does not cause anaphylaxis) to IgE isotype when there is a ten to fourteen day break in exposure to antigen.

[1085] If a patient is at high risk of generating an anti-CAR antibody response during the course of transient CAR therapy (such as those generated by RNA transductions), CAR-expressing cell infusion breaks should not last more than ten to fourteen days.

[1086] Using CARs with human (instead of murine) scFvs can reduce the likelihood and intensity of a patient having an anti-CAR response.

[1087] Dosages and therapeutic regimens of the PD-1 inhibitor, e.g., anti-PD-1 antibody molecule, can be determined by a skilled artisan. Suitable dosages of the molecules used will depend on the age and weight of the subject and the particular drug used.

[1088] Methods of administering the antibody molecules are known in the art and are described below. Suitable dosages of the molecules used will depend on the age and weight of the subject and the particular drug used. Dosages and therapeutic regimens of the anti-PD-1 antibody molecule can be determined by a skilled artisan.

[1089] In certain embodiments, the anti-PD-1 antibody molecule is administered by injection (e.g., subcutaneously or intravenously) at a dose of about 1 to 30 mg/kg, e.g., about 5 to 25 mg/kg, about 10 to 20 mg/kg, about 1 to 5 mg/kg, or about 3 mg/kg. In some embodiments, the anti-PD-1 antibody molecule is administered at a dose of about 1 mg/kg, about 3 mg/kg, about 5 mg/kg, about 10 mg/kg, about 20 mg/kg, about 30 mg/kg, or about 40 mg/kg. In some embodiments, the anti-PD-1 antibody molecule is administered at a dose of about 1-3 mg/kg, or about 3-10 mg/kg. In some embodiments, the anti-PD-1 antibody molecule is administered at a dose of about 0.5-2, 2-4, 2-5, 5-15, or 5-20 mg/kg. The dosing schedule can vary from e.g., once a week to once every 2, 3, or 4 weeks. In one embodiment, the anti-PD-1 antibody molecule is administered at a dose from about 10 to 20 mg/kg every other week. In another embodiment, the anti-PD-1 antibody molecule is administered at a dose of about 1 mg/kg once every two weeks, about 3 mg/kg once every two weeks, 10 mg/kg once every two weeks, 3 mg/kg once every four weeks, or 5 mg/kg once every four weeks.

[1090] In other embodiments, the anti-PD-1 antibody molecule is administered by injection (e.g., subcutaneously or intravenously) at a dose (e.g., a flat dose) of about 200 mg to 500 mg, e.g., about 250 mg to 450 mg, about 300 mg to 400 mg, about 250 mg to 350 mg, about 350 mg to 450 mg, or about 300 mg or about 400 mg. In some embodiments, the anti-PD-1 antibody molecule is administered at a dose of about 200 mg, about 250 mg, about 300 mg, about 350 mg, about 400 mg, about 450 mg, or about 500 mg. In some embodiments, the anti-PD1 antibody is administered at a dose of 200 or 300 mg. In some embodiments, the anti-PD-1 antibody molecule is administered at a dose of about 250-450 mg, or about 300-400 mg. In some embodiments, the anti-PD-1 antibody molecule is administered at a dose of about 200-300 mg, 250-350 mg, 300-400 mg, 350-450 mg, or 400-500 mg. The dosing schedule can vary from e.g., once a week to once every 2, 3, 4, 5, or 6 weeks. In one embodiment the anti-PD-1 antibody molecule is administered at a dose from about 300 mg to 400 mg once every three or once every four weeks. In one embodiment, the anti-PD-1 antibody molecule is administered at a dose from about 300 mg once every three weeks. In one embodiment, the anti-PD-1 antibody molecule is administered at a dose from about 400 mg once every four weeks. In one embodiment, the anti-PD-1 antibody molecule is administered at a dose from about 300 mg once every four weeks. In one embodiment, the anti-PD-1 antibody molecule is administered at a dose from about 400 mg once every three weeks. The anti-PD-1 antibody can be administered one or more times, e.g., one, two, three, four, five, six, seven or more times. In one embodiment, the anti-PD-1 antibody is administered six times. The anti-PD-1 antibody can be administered at least 5 days, e.g., about 5, 6, 7, 8, 9, 10, 11, 12, 13, 14, 20, 25, 30, 35, or 40 days, after administration of CAR-expressing cells, e.g., CD19 (e.g., CLT019 or CTL119) or BCMA CAR expressing cells. In some embodiments, the anti-PD-1 antibody can be administered about 8 days or about 15 days after administration of CAR-expressing cells, e.g., CD19 expressing cells (e.g., CLT019 or CTL119) or BCMA CAR expressing cells.

[1091] The antibody molecules can be administered by a variety of methods known in the art, although for many therapeutic applications, the preferred route/mode of administration is intravenous injection or infusion. For example, the antibody molecules can be administered by intravenous infusion at a rate of more than 20 mg/min, e.g., 20-40 mg/min, and typically greater than or equal to 40 mg/min to reach a dose of about 35 to 440 mg/m², typically about 70 to 310 mg/m², and more typically, about 110 to 130 mg/m². In embodiments, the antibody molecules can be administered by intravenous infusion at a rate of less than 10 mg/min; preferably less than or equal to 5 mg/min to reach a dose of about 1 to 100 mg/m ²,preferably about 5 to 50 mg/m², about 7 to 25 mg/m² and more preferably, about 10 mg/m². As will be appreciated by the skilled artisan, the route and/or mode of administration will vary depending upon the desired results. In certain embodiments, the active compound may be prepared with a carrier that will protect the compound against rapid release, such as a controlled release formulation, including implants, transdermal patches, and microencapsulated delivery systems. Biodegradable, biocompatible polymers can be used, such as ethylene vinyl acetate, polyanhydrides, polyglycolic acid, collagen, polyorthoesters, and polylactic acid. Many methods for the preparation of such formulations are patented or generally known to those skilled in the art. See, e.g., Sustained and Controlled Release Drug Delivery Systems, J. R. Robinson, ed., Marcel Dekker, Inc., New York, 1978.

[1092] The antibody molecule can be administered by intravenous infusion at a rate of more than 20 mg/min, e.g., 20-40 mg/min, and typically greater than or equal to 40 mg/min to reach a dose of about 35 to 440 mg/m², typically about 70 to 310 mg/m², and more typically, about 110 to 130 mg/m². In embodiments, the infusion rate of about 110 to 130 mg/m² achieves a level of about 3 mg/kg. In other embodiments, the antibody molecule can be administered by intravenous infusion at a rate of less than 10 mg/min, e.g., less than or equal to 5 mg/min to reach a dose of about 1 to 100 mg/m², e.g., about 5 to 50 mg/m², about 7 to 25 mg/m², or, about 10 mg/m². In some embodiments, the antibody is infused over a period of about 30 min.

[1093] It is to be noted that dosage values may vary with the type and severity of the condition to be alleviated. It is to be further understood that for any particular subject, specific dosage regimens should be adjusted over time according to the individual need and the professional judgment of the person administering or supervising the administration of the compositions, and that dosage ranges set forth herein are exemplary only and are not intended to limit the scope or practice of the claimed composition.

### EXAMPLES

[1094] The invention is further described in detail by reference to the following experimental examples. These examples are provided for purposes of illustration only, and are not intended to be limiting unless otherwise specified. Thus, the invention should in no way be construed as being limited to the following examples, but rather, should be construed to encompass any and all variations which become evident as a result of the teaching provided herein.

### Example 1

### CD19 CAR-Expressing Cell and PD-1 Inhibitor Decreased Tumor Burden in a Human Subject

[1095] A 34 year old woman with follicular lymphoma transformed to “double hit” DLBCL was treated with a CD19 CART cell infusion in combination with a PD-1 antagonist. The woman had previously undergone eleven lines of chemotherapy and immunotherapy, including allogeneic bone marrow transplant, but was non-responsive to the previous therapy. The woman underwent lymphodepleting chemotherapy (e.g., carboplatin and gemcitabine) prior to administration with a CD19 CART cell (CTL019). CTL019 was administered to the woman, followed by radiation therapy, and then a PD-1 antagonist, pembrolizumab (a humanized IgG4 anti-PD-1 monoclonal antibody). A biopsy was taken between administration of the CTL019 and the radiation therapy—the biopsy was analyzed by flow cytometry, immunohistochemistry (IHC), and fluorescence in situ hybridization (FISH). By flow cytometry, the sample was positive for a kappa light chain, CD10, and CD19. By IHC, the sample had large PAXS+ B cells and was PDL1+. By FISH, the sample had rearranged c-MYC and BCL-2. A second biopsy was taken after pembrolizumab treatment. In the second biopsy, extensive necrosis was observed, and no tumor was detected. Thus, the data demonstrate that the combination of a CD19 CART cell with a PD-1 antagonist was effective in reducing tumor burden in a human.

### Example 2

### Characterization of a PD-1 Antagonist, PDR-001

[1096] PDR-001 is a humanized monoclonal antibody directed against human PD-1. PDR-001 has a stabilizing hinge mutation to prevent molecule dissociation and formation of half-antibodies. PDR-001 belongs to the IgG4/kappa isotype subclass.

[1097] PDR-001 was characterized in vitro for its affinity and activity on human PD-1. PDR-001 was expressed in a CHO cell line. PDR-001 bound with high affinity to human PD-1. In Biacore assays, the Kd of PDR-001 on human PD-1 was 0.83 nM. In lymphocyte stimulation assays using human blood ex vivo, PDR-001 enhanced interleukin-2 (IL-2) production by approximately 2 fold in response to super antigen stimulation with Staphylococcus enterotoxin B (SEB). PDR-001 did not cross react with rodent PD-1 but did cross react with cynomolgus monkey PD-1 and was functionally active, thereby making cynomolgus monkey a relevant species for toxicology studies. The affinity of PDR-001 for cynomolgus PD-1 was 0.93 nM, which is similar to the Kd for human PD-1.

[1098] In addition, non-clinical toxicology of PDR-001 was evaluated in a five-week good laboratory practice (GLP) toxicology study in cynomolgus monkeys with safety pharmacology endpoints and an eight week recovery. Doses as high as 100 mg/kg/week were evaluated without drug-related in-life, mortality, organ weight changes, or macroscopic findings. At the highest doses tested, macrophage infiltrates in the spleen and limited mononuclear infiltrates in the vascular and perivascular space were noted.

### Example 3

### Clinical Results with PDR-001

[1099] A clinical study was performed on PDR-001 in patients with advanced malignancies . Patients were treated at dose levels of 1, 3, and 10 mg/kg Q2W and 3 and 5 mg/kg Q4W. None of the patients experienced a dose limiting toxicitiy, and the toxicity profile appeared similar to that of marketed inhibitors of PD-1. The pharmacokinetic data obtained from the dose escalation and modeling of the exposure data supported the use of flat dosing for PDR-001 of 400 mg administered every 4 weeks. The trough concentrations (Ctrough) were in line with observed steady state mean trough concentrations for pembrolizumab, which is approved with substantial efficacy in several cancer types. The data also supported the use of 300 mg Q3W as an alternative dose regimen, e.g., in combination treatment regimens.

### Example 4

### Clinical Study Using Combination of CTL019 and PDR-001

[1100] Subjects in the study have diffuse large B cell lymphoma (DLBCL) that has been identified as CD19+. Subjects have one or more of the following characteristics: (i) residual disease after primary therapy and as such no eligible for autologous stem cell transplant; (ii) relapsed or persistent disease after prior autologous stem cell transplant; (iii) beyond first complete response (CR) with relapsed or persistent disease and not eligible or appropriate for conventional allogeneic or autologous stem cell transplant; and/or (iv) antecedent history of follicular lymphoma or CLL/SLL.

[1101] Subjects receive an infusion of CART-19 (e.g., CTL019 cells, e.g., described in detail herein). The CART-19 cells are cryopreserved in infusible cryomedia and are administered as a single infusion. Each bag of cells contains cryomedia containing the following infusible grade reagents (% v/v): 31.25% plasmalyte-A, 31.25% dextrose (5%), 0.45% NaCl, up to 7.5% DMSO, 1% dextran 40, and 5% human serum albumin. A single dose of CART-19 cells is administered intravenously by an infusion containing 1-5×10⁸ cells transduced with the CD19 TCζ/4-1BB vector. The infusion occurs approximately 1-4 days following chemotherapy. The CART-19 is a murine CART-19 (e.g., CTL019).

[1102] Subjects also receive PDR-001. PDR-001 is expressed in CHO cells. The PDR-001 formulation is a lyophilized powder in a vial, 100 mg/lyophilisate per vial. After reconstitution of the lyophilized powder with 1.0 mL water for injection, the resulting solution contains 100 mg/mL PDR-001, histidine/histidine-HCl, sucrose, polysorbate-20 at pH 5.5. If no cytokine release syndrome (CRS) has developed, then PDR-001 is administered after CART-19 infusion. If CRS has developed after CART-19 infusion, then PDR-001 is administered after CRS has resolved.

### Example 5

### Low Dose RAD001 Stimulates CART Proliferation in a Cell Culture Model

[1103] The effect of low doses of RAD001 on CAR T cell proliferation in vitro is described, e.g., in Example 8 of US2016/0096892A1, and the entirety of the application is herein incorporated by reference.

### Example 6

### Low Dose RAD001 Stimulates CART Expansion In Vivo

[1104] The effect of low dose RAD001 on CART expansion in vivo is described, e.g., in Example 9 of US2016/0096892A1, and the entirety of the application is herein incorporated by reference.

### Example 7

### PD-1 Blockade Modulated Chimeric Antigen Receptor (CAR) Modified T Cells and Induced Tumor Regression

[1105] Antibodies blocking the programmed death 1 receptor (PD-1) on T cells produce tumor regression in multiple cancers by disrupting the PD-L1/PD-1 immune inhibitory axis. See, e.g., Topalian et al. N. Engl J Med 2012:366:2443-54: Brahmer et al. N Engl J Med 2012; 366:2455-65; Hamid, et al, N Engl J Med 2013; 369:134-44; Wolchok, et al. N Engl J Med 2013; 369:122-33; and Topalian, et at. J Clin Oncol 2014; 32:1020-30. This approach to cancer immunotherapy may be a good partner for chimeric antigen receptor (CAR) modified T cell therapies but the combination has not yet been tested. This example describes experiments in which a PD-1 blocking antibody was administered to a patient with refractory diffuse large B cell lymphoma (DLBCL) and progressive lymphoma after therapy with CAR modified T cells directed against CD19 (CART19). Following PD-1 blockade, the patient had a robust antitumor response, an expansion of CART19 cells, and decreased co-expression of PD-1 and Eomes by CART19 cells. These results suggest that anti-PD-1 can be highly effective against cancers failing to respond to CAR modified T cell therapy. It also suggests that the PD-1 pathway may be important in determining the response to CAR modified T cell immunotherapy.

[1106] A 35-year-old man with multiply pretreated, refractory DLBCL of primary mediastinal origin with extranodal involvement of small intestine at diagnosis, and mediastinum, lung, myocardium, and pericardium at progression, was treated on a clinical trial at the University of Pennsylvania with autologous CART19 cells expressing murine anti-CD19 scFv and 4-1BB—CD3ζ costimulatory—activation domains (NCT02030834). See Schuster et al. Blood 2015; 126(23):183(abstract). CART19 cells were manufactured as previously described. See, e.g., Porter Sci Transl Med 2015; 7(303):303ra139; and Milone et al. Mol Ther 2009; 17(8):1453-64. The patient received lymphodepleting chemotherapy with hyperfractionated cyclophosphamide (300 mg/m²×6 doses), followed by autologous CART19 cell infusion (5×10⁸ CART19 cells or 5.34×10⁶ cells/kg) on October 16, 2015. Follow-up chest CT scan performed on Nov. 11, 2015, to evaluate worsening dyspnea showed progressive lymphoma with enlargement of mediastinal and pericardial tumor as well as new and enlarging pulmonary nodules (FIG. 1A). Cardiac MRI documented myocardial and pericardial invasion. In view of the patient's clinical status with rapidly progressive hypoxia and respiratory distress, mediastinoscopy or thorascopic lung biopsy was not performed. Thus, it was not possible to exclude pseudoprogression as the cause of mediastinal lymph node and pulmonary parenchymal lesions enlargement following CTL019. He received pembrolizumab, 2 mg/kg, on Nov. 11, 2015. Pembrolizumab was chosen for therapy because of preclinical data indicating that anti-PD-1 therapy potently enhances the eradication of established tumors by gene-modified T cells (see, e.g., John et al. Clin Cancer Res 2013; 19(20):5636-46) and the patient's tumor cells strongly expressed PD-L1 (FIG. 1B). Other than fever, therapy was well tolerated. By Nov. 30, 2015, significant clinical improvement was noted; chest CT at that time showed interval improvement of multiple pulmonary nodules, pleural effusion, mediastinal lymphadenopathy, and pericardial nodularity (FIG. 1A). Thus, pseudoprogression after CART19 was considered unlikely since there was reduction in the size of lesiosn after administration of pembrollizumab, rather than further progression. By 3 weeks after therapy, he was able to return to work. Pembrolizumab, 2 mg/kg, was continued every 3 weeks; PET/CT scans on Dec. 22, 2015 and Apr. 20, 2016 showed continued anatomic improvement in mediastinal adenopathy with residual FDG uptake (partial metabolic response); pulmonary involvement by lymphoma had resolved. Twelve months after initiation of pembrolizumab, the patient continues to be clinically well.

[1107] Peripheral blood was analyzed for changes in CART19 DNA by qPCR (data not shown), percentage CART19 cells by flow cytometry, and changes in serum cytokines (FIGS. 2A,-2B). See Porter et al. Sci Transl Med 2015; 7(303):303ra139. CART19 DNA copy number increased to a maximum of 2,350 copies per mcg DNA following CART19 cell infusion and increased again from 497 copies per mcg on day 14 before pembrolizumab to 1,530 copies per mcg on day 26 after pembrolizumab with an apparent sustained increase after starting pembrolizumab. The percentage CAR19-expressing T cells increased after CART19 infusion stabilizing around days 10-14; however, for 48 hours after pembrolizumab, the highest percentages CAR19+ T cells were observed (FIG. 2A). This reflects an increase in both CAR19+ CD8+ and CD4+ T cells after pembrolizumab, particularly the CART19+CD8+ cells (data not shown). The highest serum IL-6 levels were observed days 3-7 following CART19 infusion and during the 24 hours after pembrolizumab (FIG. 2B). After pembrolizumab infusion, CART19 cells co-expressing PD1/Eomes decreased, in the CD4+ CART19+ cells (FIGS. 2E, 2I and 2J) and CD8+ CART19+ cells (FIGS. 2F, 2K and 2L). No changes were observed in cells co-expressing PD-1 and CTLA4, TIM3, or LAG3 (data not shown). Granzyme B+ expression increased after pembrolizumab in both T cell subsets, particularly in CART19+ CD8+ cells (FIGS. 2G-2H).

[1108] TCRβ deep sequencing was performed on the apheresis product, the CART19 transduced cell product, and on peripheral blood at day 14 (prior to pembrolizumab), at day 26 (1 hour after pembrolizumab), and at day 45 (19 days after pembrolizumab). Increases in richness (productive rearrangements) and in productive clonality after pembrolizumab were observed (data not shown). Eight dominant clones (frequency ≥1%, range 1.2%-13.1%) were observed after pembrolizumab. Two of these clones initially expanded after CART19 infusion (day 14, clone 1: 6.1%, clone 2: 2.4%) and continued to further expand after pembrolizumab (days 26 and 45, clone 1: 6.1% to 13.11% and clone 2: 2.9% to 6.45%). Four clones were present at low levels after CART19 and expanded after pembrolizumab (days 14 to 26 to 45, clone 4: 0.4% to 0.4% to 2.1%, clone 5: 0.1% to 0.3% to 1.5%, clone 7: 0.6% to 0.9% to 1.3%, clone 8: 0.1% to 0.3% to 1.2%); and two dominant clones were only present after pembrolizumab (days 14 to 26 to 45, clone 3: 0% to 0.27% to 3.57%, clone 6: 0% to 0.04% to 1.46%). The clinical observations combined with the correlative laboratory findings suggest that pembrolizumab may enhance the efficacy CART19 cells in addition to possibly inducing proliferation of other tumor-directed clones. This also suggests a potentially important role for the PD-1/PD-L1 pathway in CAR modified T cell immunotherapy in general. Based on the results described herein, a phase I/II clinical trial of pembrolizumab in patients with CD19+ lymphomas failing to respond to CART19 therapy (NCT02650999) is being performed.

### Example 8

### Low Levels of Immune Checkpoint Molecules are Associated with Improved Outcomes

[1109] Immune checkpoint molecules (PD-L1, PD1, LAG3, and TIM3) were detected in samples from lymphoma patients by immunohistochemistry. Positive and negative control tissues and cell lines were also performed. The immune checkpoint expression analysis was performed using quantitative image analysis on a region of interest which can include tumor cells and non-tumor cells such as immune cells. Samples were taken from tissue, lymph node, or bone marrow.

[1110] Immune checkpoint protein expression was compared in complete responders (CR) and patients having progressive disease (PD) following treatment with CD19-targeting CAR therapy. As shown in FIG. 3, the CR patients tended to have low levels of PD-L1, PD1, LAG3, and TIM3 before and after treatment, while PD patients tended to have high levels of these molecules before and after treatment. This Example supports combination therapy with a CAR-expressing cell and an immune checkpoint inhibitor, and supports testing to determine immune checkpoint molecule levels in patients receiving a CAR therapy.

### Example 9

### Non-Responder Subset of CLL Patients Exhibit Increased Expression of Immune Checkpoint Inhibitor Molecules

[1111] In this study, CART19 cells from clinical manufacture from 34 CLL patients were assessed for expression of immune checkpoint inhibitor molecules, such as PD-1, LAG3, and TIM3. The response of this cohort to CART19 was known and hence a correlation between response and biomarker expression patterns could be assessed.

[1112] Manufactured CART19 cells from CLL patients with different responses to CART therapy were analyzed by flow cytometry to determine the expression of CAR and the immune checkpoint inhibitor molecules PD-1, LAG3, and TIM3. The CART19 cells were from: healthy donors (HD) (n=2); CLL patients that responded to CART therapy (CR) (n=5); CLL patients that partially responded to CART therapy (PR) (n=8); CLL patients that did not respond to CART therapy (NR) (n=21). Cells were stained with fluorescently labeled antibodies that specifically recognize CD3, CD4, CD8, CD27, CD45RO, the CAR19 molecule, and immune checkpoint molecules PD-1, LAG3, and TIM3, according to standard methods for flow cytometry analysis known in the art. Expression of each marker, e.g., CD4+, CD8+, etc., was determined by flow cytometry analysis software, and subpopulations (e.g., CD4+ T cells, CD8+ T cells, or CAR19-expressing T cells) were further analyzed for the expression of immune checkpoint molecules PD-1, LAG3, and TIM3.

[1113] An example of the flow cytometry profiles analysis used to determine surface marker expression is shown in FIGS. 4A and 4B. T cells expressing CD4 were determined using flow cytometry, and were further analyzed for CAR19 and PD-1 expression, such that the x-axis of the profiles indicate CAR19 expression (the top left (Q5) and bottom left (Q8) quadrants show the CAR19-negative CD4+ cells, while the top right (Q6) and bottom right (Q7) quadrants show the CAR19-expressing CD4+ cells) and the y-axis shows PD-1 expression (the bottom left (Q8) and right (Q7) quadrants show the PD-1 negative CD4+ cells and the top left (Q5) and right (Q6) quadrants show the PD-1-expressing CD4+ cells). In the CD4+ population from a CART responder, 44.7% of the CD4+ cells overall expressed PD-1, and about 22.3% of the CAR19-expressing cells were PD-1 positive, while 27.2% of CAR19-expressing cells were PD-1 negative (FIG. 4A). In contrast, in the CD4+ population from a non-responder, there was a significant decrease in CAR19-expressing cells overall (about 15.3% compared to the 49.5% in CR), with 14.7% of the CAR19-expressing cells being PD-1 positive while only 0.64% were PD-1 negative (FIG. 4B). Comparison between the profiles in FIG. 4A and FIG. 4B shows that a much higher percentage of the CD4+ cells from a non-responder express PD-1 (about 92.9%) compared to the CART responder (about 44.7%).

[1114] Using the methods and analysis described above, the percentage of PD-1 expressing (PD-1+) cells of the CD4+ population and the CD8+ population was determined for each patient in each response group. Non-responders were shown to have a greater percentage of PD-1+ cells in both the CD4+ (FIG. 4C) and CD8+ (FIG. 4D) populations compared to those that responded to CAR therapy (CR); the increase of average PD-1 percentage was statistically significant for both CD4+ and CD8+ populations. Partial responders (PR) exhibited higher percentages of PD-1+ cells than responders (CR) in both CD4+ (FIG. 4C) and CD8+ (FIG. 4D) populations.

[1115] Next, the percentage of PD-1 expressing (PD-1+) cells of the CAR19-expressing CD4+ population and the CAR19-expressing CD8+ population was determined for each patient in each response group. Similar analysis was performed as above, with the additional step of analyzing the CD4+ and CD8+ cells for CAR19-expression, and after identification of the CAR19-expressing cells, determining the percentage of cells with PD-1 expression from the populations of CAR19-expressing cells. A similar trend as that observed in the CD4+ and CD8+ overall populations was observed for the CAR19 expressing CD4+ and CD8+ populations: non-responders were shown to have a greater percentage of PD-1+ cells in both the CD4+ (FIG. 5A) and CD8+ (FIG. 5B) populations compared to those that responded to CAR therapy (CR); the increase of average PD-1 percentage was statistically significant for both CD4+ and CD8+ populations. Partial responders (PR) exhibited higher percentages of PD-1+ cells than responders (CR) in both CD4+ (FIG. 5A) and CD8+ (FIG. 5B) populations.

[1116] Further analysis was performed to determine the distribution of cells expressing PD-1, LAG3, and TIM3 from patients with different responses to CAR therapy. Representative cell profile analysis for PD-1, LAG3, and TIM3expression in the CD4+ population is shown in FIG.

[1117] 6. The cell populations were first analyzed for CD4+ and CD8+ expression. The CD4+ population (or CD8+ population, not shown) was then analyzed for PD-1 and CAR19 expression (FIG. 6, left profiles). As described previously, non-responders (NR) had a significantly increased percentage of cells that were PD-1+ overall compared to CART responders (CR) (about 92.9% PD-1 positive for NR compared to 44.7% PD-1 positive for CR). Moreover, in non-responders, CAR19-expressing cells were mostly PD-1 positive (14.7% PD-1 positive and CAR+ compared to 0.64% PD-1 negative and CAR+). Then the populations were analyzed for PD-1 and LAG3 co-expression (FIG. 6, middle profiles). Cells that expressed both PD-1 and LAG3 are shown in the top right quadrant (Q2). Non-responders had a significantly increased percentage of cells that expressed both immune checkpoint inhibitors, PD-1 and LAG3, compared to CART responders (67.3% compared to 7.31%). PD-1 expression was also analyzed with TIM3 expression. In FIG. 6, right profiles, the box indicates the cells that express both PD-1 and TIM3. Similar to the results obtained with PD-1 and LAG3, the non-responders had a significantly higher percentage of cells that expressed both immune checkpoint inhibitors, PD-1 and TIM3, compared to CART responders (83.3% compared to 28.5%). The percentage of PD-1 expressing cells (PD1+), PD-1 and LAG3-expressing cells (PD1+LAG3+), and PD-1 and TIM3-expressing cells (PD1+TIM3+) was determined for each patient in each response group using the flow cytometry analysis as described above. Non-responders were shown to have an increased percentage of PD1+ LAG3+ cells (FIG. 7A) and PD1+TIM3+ cells (FIG. 7B) compared to CART responders that was statistically significant for both cell populations. Partial responders also showed an increased percentage of both cell populations compared to CART responders, with the averages being decreased compared to the non-responders.

[1118] These results indicate that patients that do not respond to CAR therapy exhibit increased expression of immune checkpoint inhibitors (e.g., PD-1, LAG3, and TIM3) compared to patients that respond or partially respond to CAR therapy. Thus, these results show that agents that inhibit or decrease expression of immune checkpoint inhibitors, e.g., PD-1, LAG3, or TIM3, may be useful for administration to patients receiving CAR therapy to prevent immune suppression through immune checkpoint pathways (e.g., mediated by PD-1, LAG3, or TIM3), thereby increasing the efficacy of the CAR-expressing cells.

### Example 10

### Certain Patients with Primary DLBCL Show CD3+/PD1+ Dual Positive Cancer Cells

[1119] Although there have been compelling advances in the cancer immunotherapy space recently in the form of chimeric antigen receptor (CAR) modified T-cells and checkpoint inhibitors, advanced tools to explore the therapeutic mechanisms of their combination are not widely available. To address this growing need, a robust quantitative fluorescent immunohistochemistry platform using multiplex AQUA (Automated Quantitative Analysis) technology was developed to evaluate checkpoint inhibitor expression, enumerate CAR T cells and determine the interaction between tumor cells and immune cells via novel co-localization algorithms. The utility of this method was characterized both in preclinical- and clinical model systems. In an immunodeficient mouse model of B-cell lymphoma, homing of CAR T cells to malignant B-cells in primary lymphoid organs was evaluated. The phenotype and functional status of the CAR T cells via multiplex analyses of CD4, CD8, PD1 and FOXP3 expression was determined. Additionally, to enable combination immunotherapies in Diffuse Large B-Cell Lymphoma (DLBCL) setting, prevalence of adaptive immune resistance mechanisms in the form of PD1 and PD-L1 expression in immune- and tumor cell compartments was examined via landmarks created by cytoplasmic and nuclear stains in both primary and secondary biopsies from DLBCL patients (n=63). To support patient selection for CAR T trials, expression and prevalence of relevant tumor antigens that could not be scored reproducibly by traditional methods were quantified to yield objective cut points. These quantitative multiplexed IHC methods for optimal selection of patients can be utilized in upcoming novel combination immunotherapy trials.

[1120] Sample preparation, imaging, and analysis of imaging for DLBCL tissue samples was performed on primary DLBCL (n=49) and secondary DLBCL (15) human patients.

[1121] Sample preparation. Formalin fixed paraffin embedded (FFPE) tissue samples were dewaxed. The slides were then rehydrated through a series of xylene to alcohol washes before incubating in distilled water. Heat-induced antigen retrieval was then performed using elevated pressure and temperature conditions, allowed to cool, and transferred to Tris-buffered saline. Staining was then performed where the following steps were carried out. First, endogenous peroxidase was blocked followed by incubation with a protein-blocking solution to reduce nonspecific antibody staining. Next, the slides were stained with a mouse anti-PD1 primary antibody. Slides were then washed before incubation with an anti-mouse HRP secondary antibody. Slides were washed and then PD-1 staining was detected using TSA+Cy® 5 (Perkin Elmer). Primary and secondary antibody reagents were then removed via microwave. The slides were again washed before staining with a rabbit anti-CD3 primary antibody. Slides were washed and then incubated with a cocktail of anti-rabbit HRP secondary antibody plus 4′,6-diamidino-2-phenylindole (DAPI). Slides were washed and then CD3 staining was detected using TSA-Cy® 3 (Perkin Elmer). Slides were washed a final time before they were cover-slipped with mounting media and allowed to dry overnight at room temperature.

[1122] Sample imaging and analysis. Fluorescence images were then acquired using the Vectra 2 Intelligent Slide Analysis System using the Vectra software version 2.0.8 (Perkin Elmer). First, monochrome imaging of the slide at 4× magnification using DAPI was conducted. An automated algorithm (developed using inForm) was used to identify areas of the slide containing tissue.

[1123] The areas of the slide identified as containing tissue were imaged at 4× magnification for channels associated with DAPI (blue), Cy®3 (green), and Cy® 5 (red) to create RGB images. These 4× magnification images were processed using an automated enrichment algorithm (developed using inForm) in field of view selector to identify and rank possible 20× magnification fields of view according to the highest Cy® 3 expression.

[1124] The top 40 fields of view were imaged at 20× magnification across DAPI, Cy®3, and Cy® 5 wavelengths. Raw images were reviewed for acceptability, and images that were out of focus, lacked any tumor cells, were highly necrotic, or contained high levels of fluorescence signal not associated with expected antibody localization (i.e., background staining) were rejected prior to analysis. Accepted images were processed using AQUAduct (Perkin Elmer), wherein each fluorophore was spectrally unmixed by spectral unmixer into individual channels and saved as a separate file.

[1125] The processed files were further analyzed using AQUAnalysis™ or through a fully automated process using AQUAserve™. Each DAPI image was processed by cell masker to identify all cell nuclei within that image, and then dilated by 2 pixels to represent the approximate size of an entire cell. This resulting mask represented all cells within that image. Each Cy® 5 image was processed by biomarker masker to create a binary mask of all cells that are PD-1-positive. Each Cy® 3 image was processed by biomarker masker to create a binary mask of all cells that are CD3-positive. The binary masks for all cells PD-1-positive and CD3-positive were combined to create a binary mask of all cells that are double positive for PD-1 and CD3. The % biomarker positivity (PBP) for all CD3 cells expressing PD-1 was derived, using positivity calculator, by dividing the total area, measured in pixels and determined by area evaluator, of the mask of all PD-1-positive tumor cells with the total area, measured in pixels and determined by area evaluator, of the mask of all CD3-positive cells. Representative values of PBP for all CD3-positive cells expressing PD-1 in primary and secondary DLBCL human samples are shown in FIG. 8. CD3 and PD-1 status showed that prevalence rates of CD3+/PD-1+ cells in primary is higher than secondary DLBCL setting, providing an opportunity to select patient for either single or combination treatment.

[1126] A similar experiment was performed in which PD-L1 was detected using a rabbit anti-PDL1 primary antibody and TSA+Cy5 (Perkin Elmer) on DLBCL tissue samples from primary DLBCL human patients. PD1 and CD3 were also detected on the same samples. The experiment showed that tumor microenvironments comprise cells that express PD1, CD3, and PDL1. The experiment also identified a sub-population of cells that is CD3+PD1+ (data not shown). These results support the model that a tumor microenvironment fosters immune suppressive cells that can be targeted with agents specific to PD1+ or PD-L1+ cells.

### Example 11

### Mutually Exclusive Expression of CD19 and PD-L1 in Samples Comprising DLBCL Cells

[1127] Sample preparation. Formalin fixed paraffin embedded (FFPE) tissue samples were dewaxed. The slides were then rehydrated through a series of xylene to alcohol washes before incubating in distilled water. Heat-induced antigen retrieval was then performed using elevated pressure and temperature conditions, allowed to cool, and transferred to Tris-buffered saline. Staining was then performed where the following steps were carried out. First, endogenous peroxidase was blocked followed by incubation with a protein-blocking solution to reduce nonspecific antibody staining. Next, the slides were stained with a rabbit anti-PDL1 primary antibody. Slides were then washed before incubation with an anti-rabbit HRP secondary antibody. Slides were washed and then PDL1 staining was detected using TSA+ Cy® 3 (Perkin Elmer). Primary and secondary antibody reagents were then removed via microwave. The slides were again washed before staining with a mouse anti-CD19 primary antibody. Slides were washed and then incubated with a cocktail of anti-mouse HRP secondary antibody plus 4′,6-diamidino-2-phenylindole (DAPI). Slides were washed and then CD19 staining was detected using TSA-Cy® 5 (Perkin Elmer). Slides were washed a final time before they were cover-slipped with mounting media and allowed to dry overnight at room temperature.

[1128] Sample imaging and analysis. Fluorescence images were then acquired using the Vectra 2 Intelligent Slide Analysis System using the Vectra software version 2.0.8 (Perkin Elmer). First, monochrome imaging of the slide at 4× magnification using DAPI was conducted. An automated algorithm (developed using inForm) was used to identify areas of the slide containing tissue.

[1129] The areas of the slide identified as containing tissue were imaged at 4× magnification for channels associated with DAPI (blue), Cy®3 (green), and Cy® 5 (red) to create RGB images. These 4× magnification images were processed using an automated enrichment algorithm (developed using inForm) in field of view selector to identify and rank possible 20× magnification fields of view according to the highest Cy® 3 expression.

[1130] The top 40 fields of view were imaged at 20× magnification across DAPI, Cy®3, and Cy® 5 wavelengths. Raw images were reviewed for acceptability, and images that were out of focus, lacked any tumor cells, were highly necrotic, or contained high levels of fluorescence signal not associated with expected antibody localization (i.e., background staining) were rejected prior to analysis. Accepted images were processed using AQUAduct (Perkin Elmer), wherein each fluorophore was spectrally unmixed by spectral unmixer into individual channels and saved as a separate file.

[1131] The processed files were further analyzed using AQUAnalysis™ or through a fully automated process using AQUAserve™ as described in the previous Example.

[1132] Representative values of PBP for all CD19-positive and PD-L1-positive cells in primary and secondary DLBCL human samples are shown in FIG. 9. CD19 and PDL1 expression varied in DLBCL samples. CD19 and PDL1 expression tended to be mutually exclusive, i.e., in general, a given cell expressed CD19 or PD-L1 but not both. While not wishing to be bound by theory, this may be because CD19 is expressed in DLBCL tumor cells while PD-L1 is expressed in non-tumor cells, e.g., cells that support the tumor microenvironment. This observation suggests that a combination therapy of a CD19 inhibitor (e.g., a CD19 CAR-expressing cell) and an inhibitor of PD-L1 signalling may be useful for targeting these two populations of cells.

[1133] A similar experiment was performed to, e.g., demonstrate the capability of AQUA analysis to monitor CART19 efficacy. This study monitored CD19, CD3, and the CART19 nucleic acid in samples comprising mixed cells lines with CART19+ Jurkat cells and CD19+ REH cells. CD19 and CD3 proteins were detected by antibodies, and CART19 was detected using an RNA probe against the 3′ UTR of the CAR nucleic acid. The experiment showed that the cell line samples comprise cells that express CD19, CD3, and the CART19 (data not shown). The experiment also showed that the cell line samples comprise a sub-population of cells that is CD3+/CART19+ (data not shown). Proximity analysis was performed, which showed that CART19 cells were physically proximal to CD19+ cells (data not shown). These experiments support the model that CD3+ CART19 cells infiltrate a tumor microenvironment comprising CD19+ cells and physical locations of CD19 and CART19 cells translate into efficacy of the CART19 therapy.

### Example 12

### Pembrolizumab Combined with CD19-Targeted CAR T Cells to Augment Response

[1134] Note: Unless otherwise specified, the dose of Pembrolizumab used in this Example was 2 mg/kg based on the patient's weight until a dose of 200 mg was reached, at which point a flat dose of 200 mg was administered.

[1135] CD19-targeted chimeric antigen receptor (CAR)-modified T cells have shown complete response (CR) rates exceeding 90% in B-cell acute lymphoblastic leukemia (B-ALL). A subset of patients may not respond to the CAR T therapy or may relapse due to poor CAR T cell persistence. The study described in this Example examined whether inhibition of the PD-1 checkpoint pathway can improve CAR T cell function and persistence.

[1136] Patients treated with murine (CTL019) or humanized (CTL119) anti-CD19 CAR T cells received 1-3 doses of the PD-1 inhibitor pembrolizumab starting 14 days-2 months post CAR T cell infusion. Four children with relapsed/refractory B-ALL received pembrolizumab for partial/no response (n=3) or prior history of poor CAR T cell persistence (n=1) after CTL019 (n=1) or CTL119 (n=3) infusion. Pembrolizumab was well tolerated, with fever in 2 patients and no autoimmune toxicity. An increase in detectable circulating CAR+ T cells (% of CD3+ cells by flow cytometry) and/or prolonged detection (compared to prior infusion) was observed in all 4 children after pembrolizumab.

[1137] Patients 1 and 2 received CTL119 for CD19+ relapse after prior murine CD19 CAR T cells and were treated with pembrolizumab for partial or no response to CTL119. Both had progressive disease after pembrolizumab, 1 with retained and 1 with decreased CD19 expression.

[1138] Two patients had an objective response to the addition of pembrolizumab. In patient 3, prior treatment with both CTL019 and CTL119 resulted in CR with poor CAR T cell persistence followed by CD19+ relapse. After repeat CTL119 infusion combined with pembrolizumab, patient 3 achieved a CR with prolonged CAR T cell persistence (detectable at day 50 compared to loss by day 36 after initial CTL119 infusion). Patient 4, with no prior history of CAR T cell treatment, received pembrolizumab for widespread lymph node involvement at day 28 post CTL019 infusion despite morphologic remission in bone marrow. CAR T cell proliferation after pembrolizumab was associated with dramatic reduction in PET-avid disease by 3 months post CTL019.

[1139] The results show that pembrolizumab was safely combined with CAR T cell treatment and increased or prolonged CAR+ T cell detection, with objective responses observed. Thus, immune checkpoint pathways can impact response to CAR T cell treatments.

### Example 13

### Pembrolizumab to Augment Response to CD19 CAR T Cells in Relapsed Acute Lymphoblastic Leukemia (ALL)

[1140] Note: Unless otherwise specified, the dose of Pembrolizumab used in this Example was 2 mg/kg based on the patient's weight until a dose of 200 mg was reached, at which point a flat dose of 200 mg was administered.

### Study Design

[1141] Relapsed refractory ALL patients previously treated with CD19 CAR-expressing T cells that showed poor persistence of CAR T cells were eligible to receive a repeat infusion of CAR T cells with or without Pembrolizumab. R/R ALL patients were enrolled into a clinical trial (NCT02374333). Patients had chemotherapy and lymphodepletion prior to first infusion of CAR-T cells. On Day −1 a baseline assessment was performed followed by a first infusion of humanized CD19 CAR T cells (CTL119). Patients were assessed on Day 28 for response, and follow-up assessments were performed on months 3, 6, 9 and 12. Patients were monitored for minimal residual disease (MRD), B cell aplasia and CTL119 persistence. Based on the status of CTL119 persistence, patients were re-infused with CTL119. Some patients were also treated with Pembrolizumab at least 2 weeks after re-infusion, or after recovery from CRS. FIG. 10 shows the study design.

### Results

### Case 1: Pembrolizumab for Partial Response

[1142] Case 1 describes a patient with R/R ALL with No Response (NR) to prior CD19 CAR therapy. Proliferation of huCART19 was observed in this patient, and on Day 28 the patient presented as a Complete Resposne (CR) with 1.2% CD19+ MRD. At 7 weeks post-infusion, the patient relapsed with CD19+ disease, and low levels of huCART19. The patient was then given Pembrolizumab on Day 52. A modest increase in huCART19 was observed with temporary clearance of peripheral blasts followed by progression of disease.

### Case 2: Pembrolizumab for No Response

[1143] Case 2 describes a patient with R/R/ ALL with CD19+ relapse at 12 months post prior CD19 CAR therapy. Good proliferation of huCART19 was observed in this patient. On Day 28, the patient presented as NR with CD19+ relapse. HuCART19 was reinfused into this patient at 6 weeks followed by treatment with Pembrolizumab 14 days after re-infusion. Good proliferation of huCART19 was observed along with prolonged persistence of the cells. At an assessment on Day 28 following re-infusion, the patient showed persistent disease with variable CD19 expression.

### Cases 3-5: Pembrolizumab for Poor Persistence

[1144] Cases 3, 4 and 5 describe R/R ALL patients who had prior infusion of huCART19 but showed poor persistence of CAR T cells. These patients had good initial huCART19 proliferation. All 3 patients were given a re-infusion of huCART19 followed by a dose of Pembrolizumab 14 days after the re-infusion.

[1145] Case 3 describes a patient who had R/R ALL with CD19+ relapse 9 months post prior infusion of huCART19. The Day 28 assessment after the first infusion of huCART19 showed a CR with no MRD detected. Even though the CAR T cells proliferated, the CAR T cells only persisted for a short period with B cell recovery at 2 months. At 15 months post-infusion, the patient had a relapse, and was given a re-infusion of huCART19 at 17 months followed by a dose of Pembrolizumab 14 days later. This patient showed prolonged persistence and continued B cell aplasia with Pembrolizumab administered once every 3 weeks. FIG.11 shows the percentage of huCART19 cells days post huCART19 infusion in the presence or absence of Pembrolizumab treatment. Pembrolizumab increases the persistence of huCART19 cells.

[1146] Case 4 describes a patient who presented with R/R ALL with CD19+ relapse 9 months post prior infusion of huCART19. The Day 28 assessment after the first infusion of huCART19 showed a CR with no MRD detected. Even though good CAR T cell proliferation was observed, the CAR T cells only persisted for a short period with B cell recovery observed at 2 months. At 12 months post-infusion, the patient had a relapse and was given a re-infusion of huCART19 at 14 months, followed by a dose of Pembrolizumab 14 days later. No proliferation of huCART19 was observed and the Day 28 assessment after the second infusion revealed No Response (NR) with CD19+ MRD detected.

[1147] Case 5 describes a patient who presented with R/R ALL with CD19+ relapse 12 months post prior infusion of huCART19. The Day 28 assessment after the first infusion of huCART19 showed a CR with no MRD detected. Even though good CAR T cell proliferation was observed, the CAR T cells only persisted for a short period. 6 months after the first infusion, the patient received a second infusion with short persistence of the CAR T cells. At 8 months after the first infusion, the patient received another infusion of huCART19 followed by a dose of Pembrolizumab 14 days later. This patient showed prolonged persistence and continued B cell aplasia with Pembrolizumab administered once every 3 weeks. FIG. 12 shows a graph comparing the probability of B cell recovery in patients who received only huCART19 (n=4) and patients who received huCART19 and Pembrolizumab (n=7).

### Case 6: Pembrolizumab for Lymphomatous Disease

[1148] Case 6 describes a patient with R/R ALL with an M3 stage in the bone marrow and widespread lymphomatous disease (LAD). This patient received an infusion of CART19 and the cells proliferated well. The Day 28 assessment showed CR in the bone marrow, however PET analysis showed widespread uptake in the lymph node(s). This patient was then given Pembrolizumab on Day 32 after infusion and once every 2-3 weeks. As shown in FIG. 13, Pembrolizumab treatment increased the percentage of CART19 cells. A decrease in PET avid lesions was also seen after treatment with Pembrolizumab (FIG. 14).

### Example 14

### CD19 Targeted CAR T Cells in Combination with Pembrolizumab in Relapsed/Refractory Diffuse Large B-Cell Lymphoma Patients (r/r DLBCL)

### Study Rationale

[1149] CD19 targeted CART therapy (CTL019) is potentially curative in r/r DLBCL in 36-45% of patients. However, PD-L1 is highly expressed on DLBCL cells, resulting in the activation of PD-1 on transduced T cells, e.g.,on CTL019 cells. Activation of PD-1 on CTL019 cells results in functional impairment of the CTL019 therapy. Treatment with anti-PD-1 blocks the PD-1/PD-L1 interaction, which can reactivate CTL019 cells from patients with DLBCL and improve response rates.

[1150] An initial analysis of the C2201 (JULIET) study of CTL019 in r/r DLBCL showed that a higher expression of checkpoint inhibitors (e.g., PD-1 and TIM-3) in the CTL019 finished product correlated was observed in patients who were non-responders to the CTL019 therapy compared to responders. Cytokine release syndrome was observed in 57% of patients (57.6 of 99) in this study, of which 11% had Grade 1 CRS, 23% had Grade 2 CRS, 15% had Grade 3 CRS, and 8% had Grade 4 CRS. Among patients who had CRS, the average time (in days) to onset of CRS was 4.1 days with a median of 3.0 days. The earliest patients developed CRS was 1 day after CTL019 administration, and the latest time point at which CRS was observed was 51 days after CTL019 administration. The average duration of CRS in these patients was 8.3 days with a median of 7.0 days, and the range of duration of CRS was 2-30 days in all patients. On average, it took 4.2 days for Grade 3 or Grade 4 CRS to develop. The earliest time point at which Grade 3 or Grade 4 CRS was observed was 2 days, and the latest time point at which Grade 3 or Grade 4 CRS was observed was 8 days.

[1151] In the A2101J (DLBCL) study of CTL019 in r/r DLBCL, a higher expression of checkpoint inhibitors (e.g., TIM3, LAG-3, PD1, PD-L1), was observed in biopsy samples, and in CTL019 cells in vivo obtained from non-responders compared to samples obtained from responders. Immunohistochemistry analysis of lymph node and bone marrow samples showed that in patients with progressive disease (PD), higher expression of TIM3, LAG-3, PD1, and PD-L1. Additionally, this study investigating Pembrolizumab in r/r DLBCL showed that 5 out of 9 patients who have progressed after receiving CTL019 responded to treatment with Pembrolizumab. No CRS events were observed in patients who responded to Pembrolizumab, and the duration of response (DoR) was more than 1 year.

[1152] Taken together, the data from these trials suggests that anti-PD1 therapy paired with CLT019 can be an effective treatment regimen that provides a potential for cure for patients with r/r DLBCL who are ineligible for a transplant, as demonstrated by higher overall and complete response rates. The combination of anti-PD1 and CTL019 has also shown sustained duration of responses when compared to CTL019 alone and alternative treatment options. The combination therapy has a side effect profile that is similar to CTL019 monotherapy, with no additional long term undesired effects. Therefore, the combination of Pembrolizumab and CTL019 with improved patient outcomes makes it a better, and cost-effective treatment regimen. Additionally, the combination therapy can be administered within a short period of each other, e.g., the anti-PD-1 antibody can be administered soon after (e.g., 5-15 days after) CTL019 administration, e.g., in patients who do not develop CRS. For patients with CRS after CTL019 therapy, the anti-PD-1 antibody can be adminisetered, e.g., upon resolution of CRS.

### Study Design

[1153] A Phase I/II study of concurrent administration of CTL019 and Pembrolizumab in r/r (JULIET) DLBCL patient populations will be performed. The single-arm study will enroll 20-25 patients and will include run-in of dose timing findings. Patients with r/r DLBDL who are not eligible for transplant will be enrolled in this study. Five weeks prior to (week −5) commencement of therapy, autologous CTL019 cells will be produced and cryopreserved. Salvage therapy will be initiated during this period and staging of disease will be performed one week prior to (week −1) CTL019 infusion. CTL019 will then be infused into the patients. Pembrolizumab therapy will be given at least 5 days after CTL019 infusion. Six administrations of Pembrolizumab will be given once every 3 weeks at a dose of 300 mg. Patients will be assessed monthly for the first 6 months post-infusion, every 3 months from months 7-24, and every 6 months thereafter. Patients will be followed-up for 15 years per FDA regulations for gene transfer protocols.

[1154] The results of this study will guide the initiation of a two-arm randomized Phase II registration study with 90 patients. Patients with r/r DLBCL who are not eligible for transplant will be enrolled into this study. In the Phase II study, one cohort of sixty patients will receive concurrent administration of Pembrolizumab in combination with CTL019, and another cohort of thirty patients will receive administration CTL019 alone. The primary objective of this study will be to evaluate the efficacy of CTL019 in combination with Pembrolizumab. The primary endpoint of this study will be the response rate (RR) of patients at 3 months post-treatment. A secondary objective of this study will be to assess the different in RR at 3 months between patients receiving the combination therapy in comparison with patietns receiving CTL019 alone.

### Example 15

### Pembrolizumab Therapy for Relapsed/Refractory Diffuse Large B-Cell Lymphoma Patients (r/r DLBCL) Previously Treated with CD19 Targeted CAR T Cells

[1155] A clinical trial with Pembrolizumab was initiated in patients with r/r DLBCL with documented progression after CTL019 infusion. The first dose of Pembrolizumab was administered as soon as progression was observed and documented. Pembrolizumab is administered once every 3 weeks for 2 years. Patients received Pemrbolizumab around 28 days after CTL019 infusion.

[1156] Five out of 9 patients with progressive DLBCL who had previously received CTL019 and were subsequently treated with Pembrolizumab demonstrated a response to the therapy. The longest duration of response was over 1 year. No CRS was observed in these patients.

### Example 16

### Non-Viral, RNA-Redirected Autologous Anti-CD19 T-Cells in Patients with Refractory/Relapsed Hodgkin Lymphoma (HL)

### Background

[1157] Cellular therapy using anti-CD19 autologous chimeric antigen receptor T (CART19) cells demonstrated promising outcomes in several hematologic malignancies of B-cell origin, but this therapy has not been studied in Hodgkin Lymphoma (HL) patients. While neoplastic HL Reed-Sternberg (HRS) cells are considered CD19 negative, circulating CD19 positive clonal HRS cell precursors, and CD19 positive reactive cells within the HRS tumor microenvironment represent potential therapeutic targets for CART19 in HL.

### Methods

[1158] An open-label pilot study was designed to estimate the feasibility, safety, and efficacy of RNA CART19 cell infusions in patients with relapsed/refractory HL unresponsive to or intolerant of more than one line of standard salvage therapy without curative treatment options. Autologous T-cells electroporated with chimeric anti-CD19 immunoreceptor scFv (RNA CART19 cells) were used in these patients in lieu of more persistent cells engineered by lentiviral transduction, to allow temporal CD19 targeting and limit the window for acute and long term toxicity. Following pheresis and manufacturing of RNA CART19 cells, patients undergo up to six intravenous (IV) infusions of 8 ×10⁵ to 1.5×10⁶ RNA CART19 cells/kg/dose for patients who weighed less than 80kg, and 1×10⁸ RNA CART19 cells/dose (±20%) for patients who weighed more than 80kg. Intravenous cyclophosphamide (30 mg/kg) was administered prior the first and fourth RNA CART19 cell doses to enhance engraftment. Safety and response assessments using Cheson 2007 criteria were measured at defined time points throughout the study. Primary objective was to describe manufacturing feasibility, safety, and biologic engraftment of RNA CART19 cells in relapsed HL. Secondary objectives were to estimate efficacy by overall response rates (ORR) and the effect of RNA CART19 cells on systemic soluble immune factors.

### Results

[1159] Five patients were enrolled and had RNA CART19 manufactured, with 4 patients infused and evaluated for response and/or toxicity. The characteristics of the 5 patients at enrollment include: i) a median age of 24 years with the range being 21-42 years; ii) four patients with stage IV/extranodal disease, iii) median number of previous therapies was 5, with the range being 0-8 previous therapies; iv) 4 patients had stem cell transplants (3 patients had autologous stem cell transplants, and one patient had both autologous and allogeneic stem cell transplants). Of the patients treated with the RNA CART19 cells, three pts (60%) had previously progressed on a PD-1 inhibitor. The median absolute lymphocyte count at pheresis was 1,030 mmol/μL (range: 830-2,650). All patients underwent successful manufacturing of RNA CART19. Two patients required bridging chemotherapy, with one patient receiving brentuximab, and the other patient received bendamustine and pembrolizumab. All 4 treated patients underwent lymphodepleting treatment with cyclophosphamide per protocol. The median number of CART19 cells/kg/dose was 1.5×10⁶ (range: 7.3×10⁵ to 1.52×10⁶). Each patient received 6 separate doses or infusions of RNA CART19 cells over a period of 2 weeks. Using qRT-PCR. RNA CART19 was detected transiently in peripheral blood samples immediately post-dose after 80% of the infusions (FIG. 14). There were no study related deaths or grade 3-4 non-hematologic toxicities. Most common grade 1-2 toxicities included transient headache, which was observed in 3 patients and insomnia, which was observed in 2 patients. There was no evidence of cytokine release syndrome. The overall response rate (ORR) at 1 month post-infusion was 50%: One complete resposne (CR) and one partial response (PR) were observed. One additional patient had stable disease (SD). The CR patient progressed at 3 months, and the PR patient was taken off the study to pursue other therapy. The patient with SD progressed at 3 months. Currently, two patients are in CR on a PD-1 inhibitor. One patient is in PR on lenalidomide, and one has died of progressive disease. There have not been any apparent long term toxicities.

### CONCLUSION

[1160] These data suggest that cellular therapy using non-viral, RNA-redirected CART19 cells is feasible and safe in patients with relapsed/refractory HL.

### EQUIVALENTS

[1161] The disclosures of each and every patent, patent application, and publication cited herein are hereby incorporated herein by reference in their entirety. While this invention has been disclosed with reference to specific aspects, it is apparent that other aspects and variations of this invention may be devised by others skilled in the art without departing from the true spirit and scope of the invention. The appended claims are intended to be construed to include all such aspects and equivalent variations.

What is claimed is:

1. A CAR therapy comprising a population of immune effector cells expressing a chimeric antigen receptor (CAR) for use in combination with a PD-1 inhibitor, wherein the CAR comprises an antigen (e.g., a CD19) binding domain, a transmembrane domain and an intracellular signaling domain, and wherein the dose of the PD-1 inhibitor, e.g., anti-PD-1 antibody molecule, is about 200 mg to about 450 mg, e.g., about 300 mg to about 400 mg, e.g., administered every 2 weeks, 3 weeks, 4 weeks, or 5 weeks.

2. A method of treating a subject having a cancer, comprising administering to the subject:
(i) a CAR therapy comprising a population of immune effector cells expressing a chimeric antigen receptor (CAR), wherein the CAR comprises an antigen (e.g., a CD19) binding domain, a transmembrane domain, and an intracellular signaling domain; and
(ii) a PD-1 inhibitor,
wherein the dose of the PD-1 inhibitor, e.g., anti-PD-1 antibody molecule, is about 200 mg to about 450 mg, e.g., about 300 mg to about 400 mg, e.g., administered every 2 weeks, 3 weeks, 4 weeks, or 5 weeks.

3. A CAR therapy comprising a population of immune effector cells expressing a chimeric antigen receptor (CAR) for use in combination with a PD-1 inhibitor, wherein the CAR comprises an antigen (e.g., a CD19) binding domain, a transmembrane domain and an intracellular signaling domain, and wherein administration of the PD-1 inhibitor is initiated 20 days or less after administration of the CAR therapy.

4. A method of treating a subject having a cancer, comprising administering to the subject:
(i) a CAR therapy comprising a population of immune effector cells expressing a chimeric antigen receptor (CAR), wherein the CAR comprises an antigen (e.g., a CD19) binding domain, a transmembrane domain, and an intracellular signaling domain; and
(ii) a PD-1 inhibitor,
wherein administration of the PD-1 inhibitor is initiated 20 days or less after administration of the CAR therapy.

5. The CAR therapy for use or the method of claim 3 or 4, wherein administration of the PD-1 inhibitor is initiated 16 days or less, 15 days or less, 14 days or less, 13 days or less, 12 days or less, 11 days or less, 10 days or less, 9 days or less, 8 days or less, 7 days or less, 6 days or less, 5 days or less, 4 days or less, 3 days or less, 2 days or less, after administration of the CAR therapy.

6. A CAR therapy comprising a population of immune effector cells expressing a chimeric antigen receptor (CAR) for use in combination with a PD-1 inhibitor, wherein the CAR comprises an antigen (e.g., a CD19) binding domain, a transmembrane domain and an intracellular signaling domain, and wherein administration of the PD-1 inhibitor is initiated after the subject has, or is identified as having, one or more of the following:
(a) a partial or no detectable response to the CAR therapy,
(b) a relapsed cancer after the CAR therapy,
(c) a cancer refractory to the CAR therapy;
(d) a progressive form of the cancer after the CAR therapy; or
(e) B cell recovery, e.g., less than 3 months, after the CAR therapy.

7. A method of treating a subject having a cancer, comprising administering to the subject:
(i) a CAR therapy comprising a population of immune effector cells expressing a chimeric antigen receptor (CAR), wherein the CAR comprises an antigen (e.g., a CD19) binding domain, a transmembrane domain, and an intracellular signaling domain; and
(ii) a PD-1 inhibitor,
wherein administration of the PD-1 inhibitor is initiated after the subject has, or is identified as having, one or more of the following:
(a) a partial or no detectable response to the CAR therapy,
(b) a relapsed cancer after the CAR therapy,
(c) a cancer refractory to the CAR therapy; or
(d) a progressive form of the cancer after the CAR therapy or
(e) B cell recovery, e.g., less than 3 months, after the CAR therapy.

8. A CAR therapy comprising a population of immune effector cells expressing a chimeric antigen receptor (CAR) for use in combination with a PD-1 inhibitor, wherein the CAR comprises an antigen (e.g., a CD19) binding domain, a transmembrane domain and an intracellular signaling domain, and wherein administration of the PD-1 inhibitor is initiated after administration of the CAR therapy, and the subject does not have, or has not been identified as having, one or more of the following:
(a) a partial or no detectable response to the CAR therapy,
(b) a relapsed cancer after the CAR therapy,
(c) a cancer refractory to the CAR therapy,
(d) a progressive form of the cancer or
(e) B cell recovery, e.g., less than 3 months, after the CAR therapy.

9. A method of treating a subject having a cancer, comprising administering to the subject:
(i) a CAR therapy comprising a population of immune effector cells expressing a chimeric antigen receptor (CAR), wherein the CAR comprises an antigen (e.g., a CD19) binding domain, a transmembrane domain, and an intracellular signaling domain; and
(ii) a PD-1 inhibitor,
wherein administration of the PD-1 inhibitor is initiated after administration of the CAR therapy, and the subject does not have, or has not been identified as having, one or more of the following:
(a) a partial or no detectable response to the CAR therapy,
(b) a relapsed cancer after the CAR therapy,
(c) a cancer refractory to the CAR therapy,
(d) a progressive form of the cancer, or
(e) B cell recovery, e.g., less than 3 months, after the CAR therapy.

10. The CAR therapy for use or the method of any of the preceding claims, further comprising administering one or more, e.g., 1, 2, 3, 4, or 5 or more, subsequent doses of the PD-1 inhibitor.

11. The CAR therapy for use or the method of claim 10, wherein up to 6 doses of the PD-1 inhibitor are administered.

12. The CAR therapy for use or the method of any of claims 1-11, wherein the method further comprising evaluating the presence or absence of CRS in the subject.

13. The CAR therapy for use or the method of any of claims 1-12, wherein the subject does not have, or is identified, as not having CRS, e.g., severe CRS (e.g., CRS grade 3 or grade 4), after the CAR therapy.

14. The CAR therapy for use or the method of either of claims 12-13, wherein administration of the PD-1 inhibitor is initiated after the subject is identified as not having CRS, e.g., severe CRS (e.g., CRS grade 3 or grade 4), after the CAR therapy.

15. The CAR therapy for use or the method of any of claims 12-14, wherein administration of the PD-1 inhibitor is initiated after treatment of CRS, e.g., after CRS resolution, after the CAR therapy.

16. The CAR therapy for use or the method of any of the preceding claims, wherein the CAR therapy and the PD-1 inhibitor are administered for a treatment interval, and wherein the treatment interval comprises a single dose of the PD-1 inhibitor and a single dose of the CAR-expressing cell.

17. The CAR therapy for use or the method of claim 16, wherein the treatment interval is initiated upon administration of the dose of the CAR-therapy and completed upon administration of the dose of the PD-1 inhibitor.

18. The CAR therapy for use or the method of claim 16 or 17, wherein the treatment interval further comprises administering one or more, e.g., 1, 2, 3, 4, or 5 or more, subsequent doses of the PD-1 inhibitor.

19. The CAR therapy for use or the method of claim 18, wherein up to 6 doses of the PD-1 inhibitor are administered during the treatment interval.

20. The CAR therapy for use or the method of any of claim 1-2 or 6-19, wherein the dose of the CAR-therapy is administered at least 2 days, at least 3 days, at least 4 days, at least 5 days, at least 6 days, at least 7 days, at least 8 days, at least 9 days, at least 10 days, at least 11, days, at least 12, at least 13, at least 14 days, at least 15 days, at least 16 days, at least 17 days, at least 18 days, at least 19 days, or at least 20 days before the dose of PD-1 inhibitor is administered.

21. The CAR therapy for use or the method of claim 20, wherein the dose of the CAR-therapy is administered 25-40 days (e.g., about 25-30, 30-35, or 35-40 days, e.g., about 35 days) before the dose of the PD-1 inhibitor is administered.

22. The CAR therapy for use or the method of any of claim 1-2 or 12-15, wherein the CAR-therapy and the PD-1 inhibitor are administered for a treatment interval, wherein the treatment interval comprises a first and second dose of the PD-1 inhibitor and a dose of the CAR-therapy, and wherein the dose of the CAR-therapy is administered after administration of the first dose of the PD-1 inhibitor but before the administration of the second dose of the PD-1 inhibitor.

23. The CAR therapy for use or the method of claim 22, wherein the treatment interval is initiated upon administration of the first dose of the PD-1 inhibitor and completed upon administration of the second dose of the PD-1 inhibitor.

24. The CAR therapy for use or the method of claim 22 or 23, wherein the second dose of the PD-1 inhibitor is administered at least 5 days, 7 days, 1 week, 2 weeks, or 3 weeks after administration of the first dose of the PD-1 inhibitor.

25. The CAR therapy for use or the method of any of claims 22-24, wherein the dose of the CAR-therapy is administered at least 2 days, 3 days, 4 days, 5 days, 6 days, 7 days, or 2 weeks after administration of the first dose of the PD-1 inhibitor.

26. The CAR therapy for use or the method of any of claims 22-25, wherein the second dose of the PD-1 inhibitor is administered at least 2 days, 3 days, 4 days, 5 days, 6 days, 7 days, or 2 weeks after administration of the dose of the CAR-therapy.

27. The CAR therapy for use or the method of any of claims 16-26, wherein the treatment interval is repeated, e.g., one or more times, e.g., 1, 2, 3, 4, or 5 more times.

28. The CAR therapy for use or the method of any of claims 16-27, wherein the treatment interval is followed by one or more, e.g., 1, 2, 3, 4, or 5, subsequent treatment intervals.

29. The CAR therapy for use or the method of claim 28, wherein the one or more subsequent treatment interval is different from the first or previous treatment interval.

30. The CAR therapy for use or the method of claim 28 or 29, wherein the one or more subsequent treatment intervals is administered at least 1 day, e.g., at least 1 day, at least 2 days, at least 3 days, at least 4 days, at least 5 days, at least 6 days, at least 7 days, at least 2 weeks, at least 1 month, at least 3 months, at least 6 months, or at least 1 year after the completion of the first or previous treatment interval.

31. The CAR therapy for use or the method of any of claims 16-30, wherein one or more subsequent doses, e.g., 1, 2, 3, 4, or 5 or more doses, of the PD-1 inhibitor is administered after the completion of one or more treatment intervals.

32. The CAR therapy for use or the method of any of claims 16-31, wherein a dose of the PD-1 inhibitor is administered every 5 days, 6 days, 7 days, 10 days, 2 weeks, 3 weeks, or 4 weeks after the completion of one or more treatment intervals.

33. The CAR therapy for use or the method of any of claims 16-32, wherein the treatment interval comprises a dose of CAR-therapy administered 2-20 days, 5-17 days, 7-16 days, 8-16 days, 10-15 days, 14-21 days or 2-3 weeks before the dose of the PD-1 inhibitor is administered, and wherein the treatment interval is repeated 0-52 times, and wherein the treatment intervals are initiated at least 1 day, at least 2 days, at least 3 days, at least 4 days, at least 5 days, at least 6 days, at least 7 days, at least 2 weeks, at least 1 month, at least 3 months, at least 6 months, or at least 1 year after the completion of the previous treatment interval.

34. The CAR therapy for use or the method of claim 33, wherein one or more subsequent doses of the PD-1 inhibitor is administered every 5 days, 7 days, 2 weeks, 3 weeks, or 4 weeks, after the second treatment interval.

35. The CAR therapy for use or the method of any of claims 1-15, wherein the subject is administered a single dose of a CAR-expressing cell and a single dose of a PD-1 inhibitor.

36. The CAR therapy for use or the method of claim 35, wherein the single dose of the CAR-expressing cell is administered at least 2 days, e.g., 2, 3, 4, 5, 6, 7, 8, 9, 10, 11, 12, 13, 14, 15, 16, 17, 18, 19 or 20 days, before administration of the single dose of the PD-1 inhibitor.

37. The CAR therapy for use or the method of claim 35 or 36, wherein the CAR-therapy comprises an RNA CAR molecule, e.g., an in vitro transcribed (IVT) RNA, and wherein one or more, e.g., 1, 2, 3, 4, or 5, subsequent doses of a CAR-therapy is administered to the subject after the initial dose of the CAR-therapy.

38. The CAR therapy for use or the method of claim 37, wherein the one or more subsequent doses of the CAR-expressing cell are administered at least 2 days, e.g., 2, 3, 4, 5, 6, 7 days, 2 weeks, or 3 weeks, after the previous dose of the CAR-expressing cell.

39. The CAR therapy for use or the method of any of claims 27-38, wherein one or more, e.g., 1, 2, 3, 4, or 5, or more subsequent doses of PD-1 inhibitor are administered after administration of the single dose of the PD-1 inhibitor.

40. The CAR therapy for use or the method of claim 39, wherein the one or more subsequent doses of the PD-1 inhibitor are administered at least 5 days, 7 days, 2 weeks, 3 weeks or 4 weeks, after the previous dose of PD-1 inhibitor.

41. The CAR therapy for use or the method of claim 39 or 40, wherein the one or more subsequent doses of the PD-1 inhibitor are administered at least 1, 2, 3, 4, 5, 6, or 7 days, or 2 weeks or 3 weeks, after a dose of the CAR-therapy, e.g., the initial dose of the CAR-therapy.

42. The CAR therapy for use or the method of any of claims 27-41, wherein the administration of the one or more doses of the CAR-expressing cell and the one or more doses of PD-1 inhibitor is repeated.

43. The CAR therapy for use or the method of any of the preceding claims, wherein the CAR therapy comprises a dose of CAR-expressing cells comprising about 10⁴ to about 10⁹ cells/kg, e.g., about 10⁴ to about 10⁵ cells/kg, about 10⁵ to about 10⁶ cells/kg, about 10⁶ to about 10⁷ cells/kg, about 10⁷ to about 10⁸ cells/kg, about 10⁸ to about 10⁹ cells/kg, or about 1-5×10⁷ cells/kg to about 1-5 ×10⁸ cells/kg.

44. The CAR therapy for use or the method claim 43, wherein the dose of CAR-expressing cells is about 1-5 ×10⁷ cells/kg.

45. The CAR therapy for use or the method of claim 43, wherein the dose of CAR-expressing cells is about 1-5 ×10⁸ cells/kg.

46. The CAR therapy for use or the method of any of claims 3-45, wherein the dose of the PD-1 inhibitor is between 1 and 30 mg/kg, e.g., about 1 to 25 mg/kg, about 2 to 20 mg/kg, about 2 to 5 mg/kg, or about 2 mg/kg, about 3 mg/kg, about 4 mg/kg, or about 5 mg/kg.

47. The CAR therapy for use or the method of claim 46, wherein the dose of the PD-1 inhibitor is about 1 to 20 mg/kg, or about 2-5 mg/kg e.g., administered every 2 weeks, 3 weeks, 4 weeks, or 5 weeks .

48. The CAR therapy for use or the method of any of claims 1-45, wherein the dose of the PD-1 inhibitor, e.g., anti-PD-1 antibody molecule, is about 200 mg to about 450 mg, e.g., about 200 mg to about 400 mg, e.g., administered every 2 weeks, 3 weeks, 4 weeks, or 5 weeks.

49. The CAR therapy for use or the method of any of claims 1-48, wherein the dose of the PD-1 inhibitor is about 200 mg or about 300 mg, e.g., administered every 3 weeks, e.g., via intravenous infusion.

50. The CAR therapy for use or the method of any of claims 1-48, wherein the dose of the PD-1 inhibitor is about 400 mg, e.g., administered every 4 weeks, e.g., via intravenous infusion.

51. The CAR therapy for use or the method of any of claims 1-48, wherein the PD-1 inhibitor is a PD-1 antibody molecule and is administered at a dose of about 300 mg every 2 weeks, 3 weeks, or 4 weeks, and the CAR therapy is administered at a dose of 1-5×10⁸ cells.

52. The CAR therapy for use or the method of any of the preceding claims, wherein the PD-1 inhibitor comprises an antibody molecule, a small molecule, a polypeptide, e.g., a fusion protein, or an inhibitory nucleic acid, e.g., a siRNA or shRNA.

53. The CAR therapy for use or the method of any of the preceding claims, wherein the PD-1 inhibitor is characterized by one or more of the following:
a. inhibits or reduces PD-1 expression, e.g., transcription or translation of PD-1;
b. inhibits or reduces PD-1 activity, e.g., inhibits or reduces binding of PD-1 to its cognate ligand, e.g., PD-L1 or PD-L2; or
c. binds to PD-1 or its ligand(s), e.g., PD-L1 or PD-L2.

54. The CAR therapy for use or the method of any of the preceding claims, wherein the PD-1 inhibitor is an antibody molecule.

55. The CAR therapy for use or the method of the preceding claims, wherein the PD-1 inhibitor is selected from the group consisting of Nivolumab, Pembrolizumab, PDR001, Pidilizumab, AMP 514, AMP-224, and any anti-PD-1 antibody molecule provided in Table 6.

56. The CAR therapy for use or the method of any of the preceding claims, wherein the PD-1 inhibitor comprises an anti-PD-1 antibody molecule comprising
a. a heavy chain complementary determining region 1 (HC CDR1), a heavy chain complementary determining region 2 (HC CDR2), and a heavy chain complementary determining region 3 (HC CDR3) of any PD-1 antibody molecule amino acid sequence listed in Table 6; and
b. a light chain complementary determining region 1 (LC CDR1), a light chain complementary determining region 2 (LC CDR2), and a light chain complementary determining region 3 (LC CDR3) of any PD-1 antibody molecule amino acid sequence listed in Table 6.

57. The CAR therapy for use or the method of claim 56 wherein the anti-PD-1 antibody molecule thereof comprises
a) a HC CDR1 amino acid sequence chosen from SEQ ID NO: 137 or 140, a HC CDR2 amino acid sequence of SEQ ID NO: 138 or 141, and a HC CDR3 amino acid sequence of SEQ ID NO: 139; and
b) a LC CDR1 amino acid sequence of SEQ ID NO: 146 or 149, a LC CDR2 amino acid sequence of SEQ ID NO: 147 or 150, and a LC CDR3 amino acid sequence of SEQ ID NO: 148, 151, 166, or 167 (e.g., a LC CDR3 amino acid sequence of SEQ ID NO: 166 or 167).

58. The CAR therapy for use or the method of claim 56 or 57, wherein the anti-PD-1 antibody molecule comprises a heavy chain variable region comprising:
i) the amino acid sequence of any heavy chain variable region listed in Table 6, e.g., SEQ ID NOs: 142, 144, 154, 158, 172, 184, 216, or 220;
ii) the amino acid sequence having at least one, two or three modifications but not more than 30, 20 or 10 modifications to the amino acid sequence of any heavy chain variable region provided in Table 6, e.g., SEQ ID NOs: 142, 144, 154, 158, 172, 184, 216, or 220; or
iii) an amino acid sequence with 95-99% identity to the amino acid sequence of any heavy chain variable region provided in Table 6, e.g., SEQ ID NOs: 142, 144, 154, 158, 172, 184, 216, or 220.

59. The CAR therapy for use or the method of any of claims 56-58, wherein the anti-PD-1 antibody molecule comprises a heavy chain comprising:
i) the amino acid sequence of any heavy chain listed in Table 6, e.g., SEQ ID NOs: 156, 160, 174, 186, 218, 222, 225, or 236;
ii) the amino acid sequence having at least one, two or three modifications but not more than 30, 20 or 10 modifications to any heavy chain listed in Table 6, e.g., SEQ ID NOs: 156, 160, 174, 186, 218, 222, 225, or 236; or
iii) an amino acid sequence with 95-99% identity to the amino acid sequence of any heavy chain listed in Table 6, e.g., SEQ ID NOs: 156, 160, 174, 186, 218, 222, 225, or 236.

60. The CAR therapy for use or the method of any of claims 56-59, wherein the anti-PD-1 antibody molecule comprises a light chain variable region comprising:
i) the amino acid sequence of any light chain variable region listed in Table 6, e.g., SEQ ID NOs: 152, 162, 168, 176, 180, 188, 192, 196, 200, 204, 208, or 212;
ii) the amino acid sequence having at least one, two or three modifications but not more than 30, 20 or 10 modifications to the amino acid sequence of any light chain variable region provided in Table 6, e.g., SEQ ID NOs: 152, 162, 168, 176, 180, 188, 192, 196, 200, 204, 208, or 212; or
iii) an amino acid sequence with 95-99% identity to the amino acid sequence of any light chain variable region provided in Table 6, e.g., SEQ ID NOs: 152, 162, 168, 176, 180, 188, 192, 196, 200, 204, 208, or 212.

61. The CAR therapy for use or the method of any of claims 56-60, wherein the anti-PD-1 antibody molecule comprises a light chain comprising:
i) the amino acid sequence of any light chain listed in Table 6, e.g., SEQ ID NOs: 164, 170, 178, 182, 190, 194, 198, 202, 206, 210, or 214;
ii) the amino acid sequence having at least one, two or three modifications but not more than 30, 20 or 10 modifications to any light chain listed in Table 6, e.g., SEQ ID NOs: 164, 170, 178, 182, 190, 194, 198, 202, 206, 210, or 214; or
iii) an amino acid sequence with 95-99% identity to the amino acid sequence to any any light chain listed in Table 6, e.g., SEQ ID NOs: 164, 170, 178, 182, 190, 194, 198, 202, 206, 210, or 214.

62. The CAR therapy for use or the method of any of claims 56-61, wherein the anti-PD-1 antibody molecule comprises:
i) a heavy chain variable domain comprising the amino acid sequence of SEQ ID NO: 172 and a light chain variable domain comprising the amino acid sequence of SEQ ID NO: 204
ii) a heavy chain variable domain comprising the amino acid sequence of SEQ ID NO: 142 or 144 and a light chain variable domain comprising the amino acid sequence of SEQ ID NO: 152;
iii) a heavy chain variable domain comprising the amino acid sequence of SEQ ID NO: 154 or 158 and a light chain variable domain comprising the amino acid sequence of SEQ ID NO: 162;
iv) a heavy chain variable domain comprising the amino acid sequence of SEQ ID NO: 154 or 158 and a light chain variable domain comprising the amino acid sequence of SEQ ID NO: 168;
v) a heavy chain variable domain comprising the amino acid sequence of SEQ ID NO: 172 and a light chain variable domain comprising the amino acid sequence of SEQ ID NO: 176;
vi) a heavy chain variable domain comprising the amino acid sequence of SEQ ID NO: 172 and a light chain variable domain comprising the amino acid sequence of SEQ ID NO: 180;
vii) a heavy chain variable domain comprising the amino acid sequence of SEQ ID NO: 184 and a light chain variable domain comprising the amino acid sequence of SEQ ID NO: 180;
viii) a heavy chain variable domain comprising the amino acid sequence of SEQ ID NO: 184 and a light chain variable domain comprising the amino acid sequence of SEQ ID NO: 188;
ix)a heavy chain variable domain comprising the amino acid sequence of SEQ ID NO: 172 and a light chain variable domain comprising the amino acid sequence of SEQ ID NO: 188;
x) a heavy chain variable domain comprising the amino acid sequence of SEQ ID NO: 172 and a light chain variable domain comprising the amino acid sequence of SEQ ID NO: 192;
xi) a heavy chain variable domain comprising the amino acid sequence of SEQ ID NO: 172 and a light chain variable domain comprising the amino acid sequence of SEQ ID NO: 196;
xii) a heavy chain variable domain comprising the amino acid sequence of SEQ ID NO: 184 and a light chain variable domain comprising the amino acid sequence of SEQ ID NO: 200;
xiii) a heavy chain variable domain comprising the amino acid sequence of SEQ ID NO: 172 and a light chain variable domain comprising the amino acid sequence of SEQ ID NO: 200;
xiv) a heavy chain variable domain comprising the amino acid sequence of SEQ ID NO: 184 and a light chain variable domain comprising the amino acid sequence of SEQ ID NO: 204;
xv) a heavy chain variable domain comprising the amino acid sequence of SEQ ID NO: 172 and a light chain variable domain comprising the amino acid sequence of SEQ ID NO: 204;
xvi) a heavy chain variable domain comprising the amino acid sequence of SEQ ID NO: 172 and a light chain variable domain comprising the amino acid sequence of SEQ ID NO: 208;
xvii) a heavy chain variable domain comprising the amino acid sequence of SEQ ID NO: 172 and a light chain variable domain comprising the amino acid sequence of SEQ ID NO: 212;
xviii) a heavy chain variable domain comprising the amino acid sequence of SEQ ID NO: 216 and a light chain variable domain comprising the amino acid sequence of SEQ ID NO: 204;
xix) a heavy chain variable domain comprising the amino acid sequence of SEQ ID NO: 216 and a light chain variable domain comprising the amino acid sequence of SEQ ID NO: 200;
xx) a heavy chain variable domain comprising the amino acid sequence of SEQ ID NO: 220 and a light chain variable domain comprising the amino acid sequence of SEQ ID NO: 200;
xxi) a heavy chain variable domain comprising the amino acid sequence of SEQ ID NO: 172 and a light chain variable domain comprising the amino acid sequence of SEQ ID NO: 176;
xxii) a heavy chain variable domain comprising the amino acid sequence of SEQ ID NO: 172 and a light chain variable domain comprising the amino acid sequence of SEQ ID NO: 188;
xxiii) a heavy chain variable domain comprising the amino acid sequence of SEQ ID NO: 172 and a light chain variable domain comprising the amino acid sequence of SEQ ID NO: 200; or
xxiv) a heavy chain variable domain comprising the amino acid sequence of SEQ ID NO: 184 and a light chain variable domain comprising the amino acid sequence of SEQ ID NO: 204.

63. The CAR therapy for use or the method of any of claims 56-62, wherein the anti-PD-1 antibody molecule comprises:
i) a heavy chain comprising the amino acid sequence of SEQ ID NO: 225 and a light chain comprising the amino acid sequence of SEQ ID NO: 206;
ii) a heavy chain comprising the amino acid sequence of SEQ ID NO: 144 and a light chain comprising the amino acid sequence of SEQ ID NO: 152;
iii) a heavy chain comprising the amino acid sequence of SEQ ID NO: 156 or 160 and a light chain comprising the amino acid sequence of SEQ ID NO: 164;
iv) a heavy chain comprising the amino acid sequence of SEQ ID NO: 156 or 160 and a light chain comprising the amino acid sequence of SEQ ID NO: 170.
v) a heavy chain comprising the amino acid sequence of SEQ ID NO: 174 and a light chain comprising the amino acid sequence of SEQ ID NO: 178;
vi) a heavy chain comprising the amino acid sequence of SEQ ID NO: 174 and a light chain comprising the amino acid sequence of SEQ ID NO: 182;
vii) a heavy chain comprising the amino acid sequence of SEQ ID NO: 186 and a light chain comprising the amino acid sequence of SEQ ID NO: 182;
viii) a heavy chain comprising the amino acid sequence of SEQ ID NO: 186 and a light chain comprising the amino acid sequence of SEQ ID NO: 190;
ix) a heavy chain comprising the amino acid sequence of SEQ ID NO: 174 and a light chain comprising the amino acid sequence of SEQ ID NO: 190;
x) a heavy chain comprising the amino acid sequence of SEQ ID NO: 174 and a light chain comprising the amino acid sequence of SEQ ID NO: 194;
xi) a heavy chain comprising the amino acid sequence of SEQ ID NO: 174 and a light chain comprising the amino acid sequence of SEQ ID NO: 198;
xii) a heavy chain comprising the amino acid sequence of SEQ ID NO: 186 and a light chain comprising the amino acid sequence of SEQ ID NO: 202;
xiii) a heavy chain comprising the amino acid sequence of SEQ ID NO: 174 and a light chain comprising the amino acid sequence of SEQ ID NO: 202;
xiv) a heavy chain comprising the amino acid sequence of SEQ ID NO: 186 and a light chain comprising the amino acid sequence of SEQ ID NO: 206;
xv) a heavy chain comprising the amino acid sequence of SEQ ID NO: 174 and a light chain comprising the amino acid sequence of SEQ ID NO: 206;
xvi) a heavy chain comprising the amino acid sequence of SEQ ID NO: 174 and a light chain comprising the amino acid sequence of SEQ ID NO: 210;
xvii) a heavy chain comprising the amino acid sequence of SEQ ID NO: 174 and a light chain comprising the amino acid sequence of SEQ ID NO: 214;
xviii) a heavy chain comprising the amino acid sequence of SEQ ID NO: 218 and a light chain comprising the amino acid sequence of SEQ ID NO: 206;
xix) a heavy chain comprising the amino acid sequence of SEQ ID NO: 218 and a light chain comprising the amino acid sequence of SEQ ID NO: 202;
xx) a heavy chain comprising the amino acid sequence of SEQ ID NO: 222 and a light chain comprising the amino acid sequence of SEQ ID NO: 202;
xxi) a heavy chain comprising the amino acid sequence of SEQ ID NO: 225 and a light chain comprising the amino acid sequence of SEQ ID NO: 178;
xxii) a heavy chain comprising the amino acid sequence of SEQ ID NO: 225 and a light chain comprising the amino acid sequence of SEQ ID NO: 190;
xxiii) a heavy chain comprising the amino acid sequence of SEQ ID NO: 225 and a light chain comprising the amino acid sequence of SEQ ID NO: 202; or
xxiv) a heavy chain comprising the amino acid sequence of SEQ ID NO: 236 and a light chain comprising the amino acid sequence of SEQ ID NO: 206.

64. The CAR therapy for use or the method of any of claims 56-63, wherein the PD-1 inhibitor comprises an anti-PD-1 antibody molecule comprising a heavy chain variable domain comprising the amino acid sequence of SEQ ID NO: 172 and a light chain variable domain comprising the amino acid sequence of SEQ ID NO: 204.

65. The CAR therapy for use or the method of claim 64, wherein the anti-PD1 antibody molecule comprises:
(i) a heavy chain variable (VH) region comprising the VHCDR1 amino acid sequence of SEQ ID NO: 503; the VHCDR2 amino acid sequence of SEQ ID NO: 504; and the VHCDR3 amino acid sequence of SEQ ID NO: 505; and
(ii) a light chain variable (VL) region comprising the VLCDR1 amino acid sequence of SEQ ID NO: 500; the VLCDR2 amino acid sequence of SEQ ID NO: 501; and rge VLCDR3 amino acid sequence of SEQ ID NO: 502,
or an amino acid sequence at least 85%, 90%, 95% identical or higher.

66. The CAR therapy for use or the method of any of the preceding claims, wherein the CD19 binding domain comprises a heavy chain complementary determining region 1 (HC CDR1), a heavy chain complementary determining region 2 (HC CDR2), and a heavy chain complementary determining region 3 (HC CDR3) of any CD19 heavy chain binding domain amino acid sequence listed in Table 2 or 3; and a light chain complementary determining region 1 (LC CDR1), a light chain complementary determining region 2 (LC CDR2), and a light chain complementary determining region 3 (LC CDR3) of any CD19 light chain binding domain amino acid sequence listed in Table 2 or 3.

67. The CAR therapy for use or the method of claim 66, wherein the CD19 binding domain comprises a HC CDR1, a HC CDR2, and a HC CDR3 according to the HC CDR amino acid sequences in Table 4, and a LC CDR1, a LC CDR2, and a LC CDR3 according to the LC CDR amino acid sequences in Table 5.

68. The CAR therapy for use or the method of any of the preceding claims, wherein the CD19 binding domain comprises:
a. the amino acid sequence of any heavy chain variable region of a CD19 binding domain listed in Table 2 or 3;
b. an amino acid sequence having at least one, two or three modifications but not more than 30, 20 or 10 modifications to the amino acid sequence of any heavy chain variable region of a CD19 binding domain provided in Table 2 or 3; or
c. an amino acid sequence at least 95% identical, e.g., with 95-99% identity, to the amino acid sequence of any heavy chain variable region of a CD19 binding domain provided in Table 2 or 3.

69. The CAR therapy for use or the method of any of the preceding claims, wherein the CD19 binding domain comprises:
a. the amino acid sequence of any heavy chain of a CD19 binding domain provided in Table 2 or 3;
b. an amino acid sequence having at least one, two or three modifications but not more than 30, 20 or 10 modifications to any heavy chain of a CD19 binding domain provided in Table 2 or 3; or
c. an amino acid sequence at least 95% identical, e.g., with 95-99% identity to the amino acid sequence to any heavy chain of a CD19 binding domain provided in Table 2 or 3.

70. The CAR therapy for use or the method of any of the preceding claims, wherein the CD19 binding domain comprises:
a. the amino acid sequence of any light chain variable region of a CD19 binding domain provided in Table 2 or 3;
b. an amino acid sequence having at least one, two or three modifications but not more than 30, 20 or 10 modifications to the amino acid sequence of any light chain variable region of a CD19 binding domain provided in Table 2 or 3; or
c. an amino acid sequence at least 95% identical, e.g., with 95-99% identity to the amino acid sequence of any light chain variable region of a CD19 binding domain provided in Table 2 or 3.

71. The CAR therapy for use or the method of any of the preceding claims, wherein the CD19 binding domain comprises:
a. the amino acid sequence of any light chain of a CD19 binding domain provided in Table 2 or 3;
b. the amino acid sequence having at least one, two or three modifications but not more than 30, 20 or 10 modifications to any light chain of a CD19 binding domain provided in Table 2 or 3; or
c. an amino acid sequence at least 95% identical, e.g., with 95-99%identity to the amino acid sequence to any light chain of a CD19 binding domain provided in Table 2 or 3.

72. The CAR therapy for use or the method of any of the preceding claims, wherein the CD19 binding domain comprises the amino acid sequence of any heavy chain variable region listed in Table 2 or 3, and the amino acid sequence of any light chain variable region listed in Table 2 or 3.

73. The CAR therapy for use or the method of any of the preceding claims, wherein the CD19 binding domain comprises:
a. the amino acid sequence selected from the group consisting of SEQ ID NO: 109, SEQ ID NO: 45, SEQ ID NO: 46, SEQ ID NO: 47, SEQ ID NO:48, SEQ ID NO:49, SEQ ID NO: 50, SEQ ID NO: 51, SEQ ID NO: 52, SEQ ID NO: 53, SEQ ID NO: 54, SEQ ID NO: 55, SEQ ID NO: 56, SEQ ID NO: 110, SEQ ID NO: 112, or SEQ ID NO: 115;
b. an amino acid sequence having at least one, two or three modifications but not more than 30, 20 or 10 modifications to any of SEQ ID NO: 109, SEQ ID NO: 45, SEQ ID NO: 46, SEQ ID NO: 47, SEQ ID NO:48, SEQ ID NO:49, SEQ ID NO: 50, SEQ ID NO: 51, SEQ ID NO: 52, SEQ ID NO: 53, SEQ ID NO: 54, SEQ ID NO: 55, SEQ ID NO: 56, SEQ ID NO: 110, SEQ ID NO: 112, or SEQ ID NO: 115; or
c. an amino acid sequence at least 95% identical, e.g., with 95-99%identity to the amino acid sequence to any of SEQ ID NO: 109, SEQ ID NO: 45, SEQ ID NO: 46, SEQ ID NO: 47, SEQ ID NO:48, SEQ ID NO:49, SEQ ID NO: 50, SEQ ID NO: 51, SEQ ID NO: 52, SEQ ID NO: 53, SEQ ID NO: 54, SEQ ID NO: 55, SEQ ID NO: 56, SEQ ID NO: 110, SEQ ID NO: 112, or SEQ ID NO: 115.

74. The CAR therapy for use or the method of any of the preceding claims, wherein the transmembrane domain comprises a transmembrane domain from a protein selected from the group consisting of the alpha, beta or zeta chain of the T-cell receptor, CD28, CD3 epsilon, CD45, CD4, CD5, CD8, CD9, CD16, CD22, CD33, CD37, CD64, CD80, CD86, CD134, CD137 and CD154.

75. The CAR therapy for use or the method of any of the preceding claims, wherein the transmembrane domain comprises
(i) the amino acid sequence of SEQ ID NO: 6,
(ii) an amino acid sequence comprises at least one, two or three modifications but not more than 20, 10 or 5 modifications of the amino acid sequence of SEQ ID NO:6, or
(iii) a sequence at least 95% identical, e.g., with 95-99% identity, to the amino acid sequence of SEQ ID NO:6.

76. The CAR therapy for use or the method of any of the preceding claims, wherein the CD19 binding domain is connected to the transmembrane domain by a hinge region.

77. The CAR therapy for use or the method of any of the preceding claims, wherein the hinge region comprises SEQ ID NO:2, or a sequence at least 95% identical, e.g., with 95-99%, identity thereof.

78. The CAR therapy for use or the method of any of the preceding claims, wherein the intracellular signaling domain comprises a costimulatory signaling domain comprising a functional signaling domain obtained from a protein selected from the group consisting of a MHC class I molecule, a TNF receptor protein, an Immunoglobulin-like protein, a cytokine receptor, an integrin, a signaling lymphocytic activation molecule (SLAM protein), an activating NK cell receptor, BTLA, a Toll ligand receptor, OX40, CD2, CD7, CD27, CD28, CD30, CD40, CDS, ICAM-1, LFA-1 (CD11a/CD18), 4-1BB (CD137), B7-H3, CDS, ICAM-1, ICOS (CD278), GITR, BAFFR, LIGHT, HVEM (LIGHTR), KIRDS2, SLAMF7, NKp80 (KLRF1), NKp44, NKp30, NKp46, CD19, CD4, CD8alpha, CD8beta, IL2R beta, IL2R gamma, IL7R alpha, ITGA4, VLA1, CD49a, ITGA4, IA4, CD49D, ITGA6, VLA-6, CD49f, ITGAD, CD11d, ITGAE, CD103, ITGAL, CD11a, LFA-1, ITGAM, CD11b, ITGAX, CD11c, ITGB1, CD29, ITGB2, CD18, LFA-1, ITGB7, NKG2D, NKG2C, TNFR2, TRANCE/RANKL, DNAM1 (CD226), SLAMF4 (CD244, 2B4), CD84, CD96 (Tactile), CEACAM1, CRTAM, Ly9 (CD229), CD160 (BY55), PSGL1, CD100 (SEMA4D), CD69, SLAMF6 (NTB-A, Ly108), SLAM (SLAMF1, CD150, IPO-3), BLAME (SLAMF8), SELPLG (CD162), LTBR, LAT, GADS, SLP-76, PAG/Cbp, CD19a, and a ligand that specifically binds with CD83.

79. The CAR therapy for use or the method of claim 59, wherein the costimulatory domain comprises the amino acid sequence of SEQ ID NO:7, or an amino acid sequence having at least one, two or three modifications but not more than 20, 10 or 5 modifications of the amino acid sequence of SEQ ID NO:7, or an amino acid sequence at least 95% identical to the amino acid sequence of SEQ ID NO:7.

80. The CAR therapy for use or the method of any of the preceding claims, wherein the intracellular signaling domain comprises a functional signaling domain of 4-1BB and/or a functional signaling domain of CD3 zeta.

81. The CAR therapy for use or the method of any of the preceding claims, wherein the intracellular signaling domain comprises the amino acid sequence of SEQ ID NO: 7 and/or the amino acid sequence of SEQ ID NO:9 or SEQ ID NO:10; or an amino acid sequence having at least one, two or three modifications but not more than 20, 10 or 5 modifications of the amino acid sequence of SEQ ID NO:7 and/or the amino acid sequence of SEQ ID NO:9 or SEQ ID NO:10; or an amino acid sequence at least 95% identical to the amino acid sequence of SEQ ID NO:7 and/or the amino acid sequence of SEQ ID NO:9 or SEQ ID NO:10.

82. The CAR therapy for use or the method of any of the preceding claims, wherein the intracellular signaling domain comprises the amino acid sequence of SEQ ID NO:7 and the amino acid sequence of SEQ ID NO:9 or SEQ ID NO:10, wherein the amino acid sequences comprising the intracellular signaling domain are expressed in the same frame and as a single polypeptide chain.

83. The CAR therapy for use or the method of any of the preceding claims, wherein the CAR further comprises a leader sequence comprising the amino acid sequence of SEQ ID NO:1.

84. The CAR therapy for use or the method of any of the preceding claims, wherein the CAR comprises:
(i) the amino acid sequence of any of SEQ ID NO: 108; SEQ ID NO: 93; SEQ ID NO: 94, SEQ ID NO: 95, SEQ ID NO: 96, SEQ ID NO: 97, SEQ ID NO: 98, SEQ ID NO: 99, SEQ ID NO: 100, SEQ ID NO: 101, SEQ ID NO: 102, SEQ ID NO: 103, SEQ ID NO: 104, SEQ ID NO: 111, SEQ ID NO: 114, or SEQ ID NO: 116;
(ii) an amino acid sequence having at least one, two or three modifications but not more than 30, 20 or 10 modifications to any of SEQ ID NO: 108; SEQ ID NO: 93; SEQ ID NO: 94, SEQ ID NO: 95, SEQ ID NO: 96, SEQ ID NO: 97, SEQ ID NO: 98, SEQ ID NO: 99, SEQ ID NO: 100, SEQ ID NO: 101, SEQ ID NO: 102, SEQ ID NO: 103, SEQ ID NO: 104, SEQ ID NO: 111, SEQ ID NO: 114, or SEQ ID NO: 116; or
(iii) an amino acid sequence at least 95 identical to any of SEQ ID NO: 108; SEQ ID NO: 93; SEQ ID NO: 94, SEQ ID NO: 95, SEQ ID NO: 96, SEQ ID NO: 97, SEQ ID NO: 98, SEQ ID NO: 99, SEQ ID NO: 100, SEQ ID NO: 101, SEQ ID NO: 102, SEQ ID NO: 103, SEQ ID NO: 104, SEQ ID NO: 111, SEQ ID NO: 114, or SEQ ID NO: 116.

85. The CAR therapy for use or the method of any of the preceding claims, wherein the cell comprising a CAR comprises a nucleic acid encoding the CAR.

86. The CAR therapy for use or the method of claim 85, wherein the nucleic acid encoding the CAR is a lentiviral vector.

87. The CAR therapy for use or the method of claim 85 or 86, wherein the nucleic acid encoding the CAR is introduced into the cells by lentiviral transduction.

88. The CAR therapy for use or the method of any of claims 85-87, wherein the nucleic acid encoding the CAR is an RNA, e.g., an in vitro transcribed RNA.

89. The CAR therapy for use or the method of claim 88, wherein the nucleic acid encoding the CAR is introduced into the cells by electroporation.

90. The CAR therapy for use or the method of any of the preceding claims, wherein the cell is a T cell or an NK cell.

91. The CAR therapy for use or the method of claim 90, wherein the T cell is an autologous or allogeneic T cell.

92. The CAR therapy for use or the method of any of the preceding claims, further comprising administering an additional anti-cancer agent.

93. The CAR therapy for use or the method of any of the preceding claims, wherein the cancer is a hematological cancer.

94. The CAR therapy for use or the method of any of the preceding claims, wherein the cancer is a lymphoma or a leukemia.

95. The CAR therapy for use or the method of claim 93, wherein the cancer is chosen from one or more of B-cell acute lymphoid leukemia (BALL), T-cell acute lymphoid leukemia (TALL), small lymphocytic leukemia (SLL), acute lymphoid leukemia (ALL), chronic myelogenous leukemia (CML), chronic lymphocytic leukemia (CLL), mantle cell lymphoma (MCL), B cell prolymphocytic leukemia, blastic plasmacytoid dendritic cell neoplasm, Burkitt's lymphoma, diffuse large B cell lymphoma (DLBCL), follicular lymphoma, hairy cell leukemia, small cell- or a large cell-follicular lymphoma, malignant lymphoproliferative conditions, MALT lymphoma, Marginal zone lymphoma, multiple myeloma, myelodysplasia and myelodysplastic syndrome, non-Hodgkin lymphoma, Hodgkin lymphoma, plasmablastic lymphoma, plasmacytoid dendritic cell neoplasm, or Waldenstrom macroglobulinemia.

96. The CAR therapy for use or the method of claim 93, wherein the cancer is acute lymphoid leukemia (ALL), e.g., prediatric B-ALL, or a B cell lymphoma, e.g., pediatric B cell lymphoma.

97. The CAR therapy for use or the method of claim 93, wherein the cancer is diffuse large B cell lymphoma (DLBCL), e.g., relapsed or refractory DLBCL.

98. The CAR therapy for use or the method of any of the preceding claims, wherein the subject is a mammal, e.g., a human.

99. The CAR therapy for use or the method of any of the preceding claims, wherein the subject expresses PD-1, PD-L1 and/or PD-L2.

100. The CAR therapy for use or the method of claim 99, wherein a cancer cell or a cell in close proximity to a cancer cell in the subject expresses PD-1, PD-L1, and/or PD-L2.

101. The CAR therapy for use or the method of claim 99 or 100, wherein the cancer cell is from a DLBCL sample, e.g., from a relapsed or refractory DLBCL sample.

102. The CAR therapy for use or the method of any of the preceding claims, wherein the cell expressing a CAR expresses PD-1, PD-L1, and/or PD-L2.

103. The CAR therapy for use or the method of any of claims 1-102, wherein the subject has, or is identified as having, a higher number or percentage of immune effector cells, e.g., CD4⁺ and/or CD8⁺ T cells, expressing one, two, three, or all of PD-1, LAG-3 or TIM-3, compared to a reference value, e.g., a complete responder to the CAR therapy.

104. The CAR therapy for use or the method of 103, wherein the subject has, or is identified as having, a higher number of: PD-1 expressing immune effector cells, e.g., CD4⁺ and/or CD8⁺ T cells; PD-1 and LAG-3-expressing immune effector cells, e.g., CD4⁺ and/or CD8⁺ T cells; PD-1 and TIM-3 expressing immune effector cells, e.g., CD4⁺ and/or CD8⁺ T cells; or PD-1, TIM-3 and LAG-3 expressing immune effector cells, e.g., CD4⁺ and/or CD8⁺ T cells.

105. The CAR therapy for use or the method of 103 or 104, wherein the immune effector cells, e.g., CD4⁺ and/or CD8⁺ T cells, coexpress a CAR, e.g., a CD19 CAR.

106. A combination comprising:
a cell, e.g., a population of immune effector cells, comprising a CAR, wherein the CAR comprises an antigen binding domain, a transmembrane domain, and an intracellular signaling domain; and
a PD-1 inhibitor chosen pembrolizumab, nivolumab, or any of the antibody molecules from Table 6, e.g., comprising the variable light chain and the variable heavy chain amino acid sequences of SEQ ID NO: 204 and SEQ ID NO: 172,
for use in treating a cancer, in a subject.

107. A composition (e.g., one or more compositions or dosage forms), comprising:
a cell, e.g., a population of immune effector cells, comprising a CAR, wherein the CAR comprises an antigen binding domain, a transmembrane domain, and an intracellular signaling domain, and
a PD-1 inhibitor chosen from Table 6, e.g., comprising the variable light chain and the variable heavy chain amino acid sequences of SEQ ID NO: 204 and SEQ ID NO: 172.

108. The method, combination, or composition of any of the preceding claims, wherein the CD19 binding domain is the amino acid sequence of SEQ ID NO: 109; or wherein the CAR comprises the amino acid sequence of SEQ ID NO: 108.

The application's sequence listing, which the Patent Office published only in electronic form, follows.

SEQUENCE LISTING (532 sequences)

SEQ ID NO: 1 - protein, 21 aa, Artificial Sequence
  source: /note="Description of Artificial Sequence: Synthetic peptide"
MALPVTALLLPLALLLHAARP

SEQ ID NO: 2 - protein, 45 aa, Artificial Sequence
  source: /note="Description of Artificial Sequence: Synthetic polypeptide"
TTTPAPRPPTPAPTIASQPLSLRPEACRPAAGGAVHTRGLDFACD

SEQ ID NO: 3 - protein, 230 aa, Artificial Sequence
  source: /note="Description of Artificial Sequence: Synthetic polypeptide"
ESKYGPPCPPCPAPEFLGGPSVFLFPPKPKDTLMISRTPEVTCVVVDVSQEDPEVQFNWYVDGVEVHNAKTKPREEQFNSTYRVVSVLTVLHQDWLNGKEYKCKVSNKGLPSSIEKTISKAKGQPREPQVYTLPPSQEEMTKNQVSLTCLVKGFYPSDIAVEWESNGQPENNYKTTPPVLDSDGSFFLYSRLTVDKSRWQEGNVFSCSVMHEALHNHYTQKSLSLSLGKM

SEQ ID NO: 4 - protein, 282 aa, Artificial Sequence
  source: /note="Description of Artificial Sequence: Synthetic polypeptide"
RWPESPKAQASSVPTAQPQAEGSLAKATTAPATTRNTGRGGEEKKKEKEKEEQEERETKTPECPSHTQPLGVYLLTPAVQDLWLRDKATFTCFVVGSDLKDAHLTWEVAGKVPTGGVEEGLLERHSNGSQSQHSRLTLPRSLWNAGTSVTCTLNHPSLPPQRLMALREPAAQAPVKLSLNLLASSDPPEAASWLLCEVSGFSPPNILLMWLEDQREVNTSGFAPARPPPQPGSTTFWAWSVLRVPAPPSPQPATYTCVVSHEDSRTLLNASRSLEVSYVTDH

SEQ ID NO: 5 - protein, 10 aa, Artificial Sequence
  source: /note="Description of Artificial Sequence: Synthetic peptide"
GGGGSGGGGS

SEQ ID NO: 6 - protein, 24 aa, Artificial Sequence
  source: /note="Description of Artificial Sequence: Synthetic peptide"
IYIWAPLAGTCGVLLLSLVITLYC

SEQ ID NO: 7 - protein, 42 aa, Artificial Sequence
  source: /note="Description of Artificial Sequence: Synthetic polypeptide"
KRGRKKLLYIFKQPFMRPVQTTQEEDGCSCRFPEEEEGGCEL

SEQ ID NO: 8 - protein, 48 aa, Artificial Sequence
  source: /note="Description of Artificial Sequence: Synthetic polypeptide"
QRRKYRSNKGESPVEPAEPCRYSCPREEEGSTIPIQEDYRKPEPACSP

SEQ ID NO: 9 - protein, 112 aa, Artificial Sequence
  source: /note="Description of Artificial Sequence: Synthetic polypeptide"
RVKFSRSADAPAYKQGQNQLYNELNLGRREEYDVLDKRRGRDPEMGGKPRRKNPQEGLYNELQKDKMAEAYSEIGMKGERRRGKGHDGLYQGLSTATKDTYDALHMQALPPR

SEQ ID NO: 10 - protein, 112 aa, Artificial Sequence
  source: /note="Description of Artificial Sequence: Synthetic polypeptide"
RVKFSRSADAPAYQQGQNQLYNELNLGRREEYDVLDKRRGRDPEMGGKPRRKNPQEGLYNELQKDKMAEAYSEIGMKGERRRGKGHDGLYQGLSTATKDTYDALHMQALPPR

SEQ ID NO: 11 - DNA, 1184 bp, Artificial Sequence
  source: /note="Description of Artificial Sequence: Synthetic polynucleotide"
cgtgaggctccggtgcccgtcagtgggcagagcgcacatcgcccacagtccccgagaagttggggggaggggtcggcaattgaaccggtgcctagagaaggtggcgcggggtaaactgggaaagtgatgtcgtgtactggctccgcctttttcccgagggtgggggagaaccgtatataagtgcagtagtcgccgtgaacgttctttttcgcaacgggtttgccgccagaacacaggtaagtgccgtgtgtggttcccgcgggcctggcctctttacgggttatggcccttgcgtgccttgaattacttccacctggctgcagtacgtgattcttgatcccgagcttcgggttggaagtgggtgggagagttcgaggccttgcgcttaaggagccccttcgcctcgtgcttgagttgaggcctggcctgggcgctggggccgccgcgtgcgaatctggtggcaccttcgcgcctgtctcgctgctttcgataagtctctagccatttaaaatttttgatgacctgctgcgacgctttttttctggcaagatagtcttgtaaatgcgggccaagatctgcacactggtatttcggtttttggggccgcgggcggcgacggggcccgtgcgtcccagcgcacatgttcggcgaggcggggcctgcgagcgcggccaccgagaatcggacgggggtagtctcaagctggccggcctgctctggtgcctggcctcgcgccgccgtgtatcgccccgccctgggcggcaaggctggcccggtcggcaccagttgcgtgagcggaaagatggccgcttcccggccctgctgcagggagctcaaaatggaggacgcggcgctcgggagagcgggcgggtgagtcacccacacaaaggaaaagggcctttccgtcctcagccgtcgcttcatgtgactccacggagtaccgggcgccgtccaggcacctcgattagttctcgagcttttggagtacgtcgtctttaggttggggggaggggttttatgcgatggagtttccccacactgagtgggtggagactgaagttaggccagcttggcacttgatgtaattctccttggaatttgccctttttgagtttggatcttggttcattctcaagcctcagacagtggttcaaagtttttttcttccatttcaggtgtcgtga

SEQ ID NO: 12 - DNA, 63 bp, Artificial Sequence
  source: /note="Description of Artificial Sequence: Synthetic oligonucleotide"
atggccctgcctgtgacagccctgctgctgcctctggctctgctgctgcatgccgctagaccc

SEQ ID NO: 13 - DNA, 135 bp, Artificial Sequence
  source: /note="Description of Artificial Sequence: Synthetic polynucleotide"
accacgacgccagcgccgcgaccaccaacaccggcgcccaccatcgcgtcgcagcccctgtccctgcgcccagaggcgtgccggccagcggcggggggcgcagtgcacacgagggggctggacttcgcctgtgat

SEQ ID NO: 14 - DNA, 690 bp, Artificial Sequence
  source: /note="Description of Artificial Sequence: Synthetic polynucleotide"
gagagcaagtacggccctccctgccccccttgccctgcccccgagttcctgggcggacccagcgtgttcctgttcccccccaagcccaaggacaccctgatgatcagccggacccccgaggtgacctgtgtggtggtggacgtgtcccaggaggaccccgaggtccagttcaactggtacgtggacggcgtggaggtgcacaacgccaagaccaagccccgggaggagcagttcaatagcacctaccgggtggtgtccgtgctgaccgtgctgcaccaggactggctgaacggcaaggaatacaagtgtaaggtgtccaacaagggcctgcccagcagcatcgagaaaaccatcagcaaggccaagggccagcctcgggagccccaggtgtacaccctgccccctagccaagaggagatgaccaagaaccaggtgtccctgacctgcctggtgaagggcttctaccccagcgacatcgccgtggagtgggagagcaacggccagcccgagaacaactacaagaccaccccccctgtgctggacagcgacggcagcttcttcctgtacagccggctgaccgtggacaagagccggtggcaggagggcaacgtctttagctgctccgtgatgcacgaggccctgcacaaccactacacccagaagagcctgagcctgtccctgggcaagatg

SEQ ID NO: 15 - DNA, 847 bp, Artificial Sequence
  source: /note="Description of Artificial Sequence: Synthetic polynucleotide"
aggtggcccgaaagtcccaaggcccaggcatctagtgttcctactgcacagccccaggcagaaggcagcctagccaaagctactactgcacctgccactacgcgcaatactggccgtggcggggaggagaagaaaaaggagaaagagaaagaagaacaggaagagagggagaccaagacccctgaatgtccatcccatacccagccgctgggcgtctatctcttgactcccgcagtacaggacttgtggcttagagataaggccacctttacatgtttcgtcgtgggctctgacctgaaggatgcccatttgacttgggaggttgccggaaaggtacccacagggggggttgaggaagggttgctggagcgccattccaatggctctcagagccagcactcaagactcacccttccgagatccctgtggaacgccgggacctctgtcacatgtactctaaatcatcctagcctgcccccacagcgtctgatggcccttagagagccagccgcccaggcaccagttaagcttagcctgaatctgctcgccagtagtgatcccccagaggccgccagctggctcttatgcgaagtgtccggctttagcccgcccaacatcttgctcatgtggctggaggaccagcgagaagtgaacaccagcggcttcgctccagcccggcccccaccccagccgggttctaccacattctgggcctggagtgtcttaagggtcccagcaccacctagcccccagccagccacatacacctgtgttgtgtcccatgaagatagcaggaccctgctaaatgcttctaggagtctggaggtttcctacgtgactgaccatt

SEQ ID NO: 16 - DNA, 30 bp, Artificial Sequence
  source: /note="Description of Artificial Sequence: Synthetic oligonucleotide"
ggtggcggaggttctggaggtggaggttcc

SEQ ID NO: 17 - DNA, 72 bp, Artificial Sequence
  source: /note="Description of Artificial Sequence: Synthetic oligonucleotide"
atctacatctgggcgcccttggccgggacttgtggggtccttctcctgtcactggttatcaccctttactgc

SEQ ID NO: 18 - DNA, 126 bp, Artificial Sequence
  source: /note="Description of Artificial Sequence: Synthetic polynucleotide"
aaacggggcagaaagaaactcctgtatatattcaaacaaccatttatgagaccagtacaaactactcaagaggaagatggctgtagctgccgatttccagaagaagaagaaggaggatgtgaactg

SEQ ID NO: 19 - DNA, 123 bp, Artificial Sequence
  source: /note="Description of Artificial Sequence: Synthetic polynucleotide"
aggagtaagaggagcaggctcctgcacagtgactacatgaacatgactccccgccgccccgggcccacccgcaagcattaccagccctatgccccaccacgcgacttcgcagcctatcgctcc

SEQ ID NO: 20 - DNA, 336 bp, Artificial Sequence
  source: /note="Description of Artificial Sequence: Synthetic polynucleotide"
agagtgaagttcagcaggagcgcagacgcccccgcgtacaagcagggccagaaccagctctataacgagctcaatctaggacgaagagaggagtacgatgttttggacaagagacgtggccgggaccctgagatggggggaaagccgagaaggaagaaccctcaggaaggcctgtacaatgaactgcagaaagataagatggcggaggcctacagtgagattgggatgaaaggcgagcgccggaggggcaaggggcacgatggcctttaccagggtctcagtacagccaccaaggacacctacgacgcccttcacatgcaggccctgccccctcgc

SEQ ID NO: 21 - DNA, 336 bp, Artificial Sequence
  source: /note="Description of Artificial Sequence: Synthetic polynucleotide"
agagtgaagttcagcaggagcgcagacgcccccgcgtaccagcagggccagaaccagctctataacgagctcaatctaggacgaagagaggagtacgatgttttggacaagagacgtggccgggaccctgagatggggggaaagccgagaaggaagaaccctcaggaaggcctgtacaatgaactgcagaaagataagatggcggaggcctacagtgagattgggatgaaaggcgagcgccggaggggcaaggggcacgatggcctttaccagggtctcagtacagccaccaaggacacctacgacgcccttcacatgcaggccctgccccctcgc

SEQ ID NO: 22 - protein, 373 aa, Artificial Sequence
  source: /note="Description of Artificial Sequence: Synthetic polypeptide"
PGWFLDSPDRPWNPPTFSPALLVVTEGDNATFTCSFSNTSESFVLNWYRMSPSNQTDKLAAFPEDRSQPGQDCRFRVTQLPNGRDFHMSVVRARRNDSGTYLCGAISLAPKAQIKESLRAELRVTERRAEVPTAHPSPSPRPAGQFQTLVTTTPAPRPPTPAPTIASQPLSLRPEACRPAAGGAVHTRGLDFACDIYIWAPLAGTCGVLLLSLVITLYCKRGRKKLLYIFKQPFMRPVQTTQEEDGCSCRFPEEEEGGCELRVKFSRSADAPAYKQGQNQLYNELNLGRREEYDVLDKRRGRDPEMGGKPRRKNPQEGLYNELQKDKMAEAYSEIGMKGERRRGKGHDGLYQGLSTATKDTYDALHMQALPPR

SEQ ID NO: 23 - DNA, 1182 bp, Artificial Sequence
  source: /note="Description of Artificial Sequence: Synthetic polynucleotide"
atggccctccctgtcactgccctgcttctccccctcgcactcctgctccacgccgctagaccacccggatggtttctggactctccggatcgcccgtggaatcccccaaccttctcaccggcactcttggttgtgactgagggcgataatgcgaccttcacgtgctcgttctccaacacctccgaatcattcgtgctgaactggtaccgcatgagcccgtcaaaccagaccgacaagctcgccgcgtttccggaagatcggtcgcaaccgggacaggattgtcggttccgcgtgactcaactgccgaatggcagagacttccacatgagcgtggtccgcgctaggcgaaacgactccgggacctacctgtgcggagccatctcgctggcgcctaaggcccaaatcaaagagagcttgagggccgaactgagagtgaccgagcgcagagctgaggtgccaactgcacatccatccccatcgcctcggcctgcggggcagtttcagaccctggtcacgaccactccggcgccgcgcccaccgactccggccccaactatcgcgagccagcccctgtcgctgaggccggaagcatgccgccctgccgccggaggtgctgtgcatacccggggattggacttcgcatgcgacatctacatttgggctcctctcgccggaacttgtggcgtgctccttctgtccctggtcatcaccctgtactgcaagcggggtcggaaaaagcttctgtacattttcaagcagcccttcatgaggcccgtgcaaaccacccaggaggaggacggttgctcctgccggttccccgaagaggaagaaggaggttgcgagctgcgcgtgaagttctcccggagcgccgacgcccccgcctataagcagggccagaaccagctgtacaacgaactgaacctgggacggcgggaagagtacgatgtgctggacaagcggcgcggccgggaccccgaaatgggcgggaagcctagaagaaagaaccctcaggaaggcctgtataacgagctgcagaaggacaagatggccgaggcctactccgaaattgggatgaagggagagcggcggaggggaaaggggcacgacggcctgtaccaaggactgtccaccgccaccaaggacacatacgatgccctgcacatgcaggcccttccccctcgc

SEQ ID NO: 24 - protein, 394 aa, Artificial Sequence
  source: /note="Description of Artificial Sequence: Synthetic polypeptide"
MALPVTALLLPLALLLHAARPPGWFLDSPDRPWNPPTFSPALLVVTEGDNATFTCSFSNTSESFVLNWYRMSPSNQTDKLAAFPEDRSQPGQDCRFRVTQLPNGRDFHMSVVRARRNDSGTYLCGAISLAPKAQIKESLRAELRVTERRAEVPTAHPSPSPRPAGQFQTLVTTTPAPRPPTPAPTIASQPLSLRPEACRPAAGGAVHTRGLDFACDIYIWAPLAGTCGVLLLSLVITLYCKRGRKKLLYIFKQPFMRPVQTTQEEDGCSCRFPEEEEGGCELRVKFSRSADAPAYKQGQNQLYNELNLGRREEYDVLDKRRGRDPEMGGKPRRKNPQEGLYNELQKDKMAEAYSEIGMKGERRRGKGHDGLYQGLSTATKDTYDALHMQALPPR

SEQ ID NO: 25 - protein, 5 aa, Artificial Sequence
  source: /note="Description of Artificial Sequence: Synthetic peptide"
GGGGS

SEQ ID NO: 26 - protein, 30 aa, Artificial Sequence
  source: /note="Description of Artificial Sequence: Synthetic polypeptide"
  MISC_FEATURE (1)..(30): /note="This sequence may encompass 1-6 "Gly Gly Gly Gly Ser" repeating units"
GGGGSGGGGSGGGGSGGGGSGGGGSGGGGS

SEQ ID NO: 27 - protein, 20 aa, Artificial Sequence
  source: /note="Description of Artificial Sequence: Synthetic peptide"
GGGGSGGGGSGGGGSGGGGS

SEQ ID NO: 28 - protein, 15 aa, Artificial Sequence
  source: /note="Description of Artificial Sequence: Synthetic peptide"
GGGGSGGGGSGGGGS

SEQ ID NO: 29 - protein, 4 aa, Artificial Sequence
  source: /note="Description of Artificial Sequence: Synthetic peptide"
GGGS

SEQ ID NO: 30 - DNA, 5000 bp, Artificial Sequence
  source: /note="Description of Artificial Sequence: Synthetic polynucleotide"
  misc_feature (1)..(5000): /note="This sequence may encompass 50-5000 nucleotides"
aaaaaaaaaaaaaaaaaaaaaaaaaaaaaaaaaaaaaaaaaaaaaaaaaaaaaaaaaaaaaaaaaaaaaaaaaaaaaaaaaaaaaaaaaaaaaaaaaaaaaaaaaaaaaaaaaaaaaaaaaaaaaaaaaaaaaaaaaaaaaaaaaaaaaaaaaaaaaaaaaaaaaaaaaaaaaaaaaaaaaaaaaaaaaaaaaaaaaaaaaaaaaaaaaaaaaaaaaaaaaaaaaaaaaaaaaaaaaaaaaaaaaaaaaaaaaaaaaaaaaaaaaaaaaaaaaaaaaaaaaaaaaaaaaaaaaaaaaaaaaaaaaaaaaaaaaaaaaaaaaaaaaaaaaaaaaaaaaaaaaaaaaaaaaaaaaaaaaaaaaaaaaaaaaaaaaaaaaaaaaaaaaaaaaaaaaaaaaaaaaaaaaaaaaaaaaaaaaaaaaaaaaaaaaaaaaaaaaaaaaaaaaaaaaaaaaaaaaaaaaaaaaaaaaaaaaaaaaaaaaaaaaaaaaaaaaaaaaaaaaaaaaaaaaaaaaaaaaaaaaaaaaaaaaaaaaaaaaaaaaaaaaaaaaaaaaaaaaaaaaaaaaaaaaaaaaaaaaaaaaaaaaaaaaaaaaaaaaaaaaaaaaaaaaaaaaaaaaaaaaaaaaaaaaaaaaaaaaaaaaaaaaaaaaaaaaaaaaaaaaaaaaaaaaaaaaaaaaaaaaaaaaaaaaaaaaaaaaaaaaaaaaaaaaaaaaaaaaaaaaaaaaaaaaaaaaaaaaaaaaaaaaaaaaaaaaaaaaaaaaaaaaaaaaaaaaaaaaaaaaaaaaaaaaaaaaaaaaaaaaaaaaaaaaaaaaaaaaaaaaaaaaaaaaaaaaaaaaaaaaaaaaaaaaaaaaaaaaaaaaaaaaaaaaaaaaaaaaaaaaaaaaaaaaaaaaaaaaaaaaaaaaaaaaaaaaaaaaaaaaaaaaaaaaaaaaaaaaaaaaaaaaaaaaaaaaaaaaaaaaaaaaaaaaaaaaaaaaaaaaaaaaaaaaaaaaaaaaaaaaaaaaaaaaaaaaaaaaaaaaaaaaaaaaaaaaaaaaaaaaaaaaaaaaaaaaaaaaaaaaaaaaaaaaaaaaaaaaaaaaaaaaaaaaaaaaaaaaaaaaaaaaaaaaaaaaaaaaaaaaaaaaaaaaaaaaaaaaaaaaaaaaaaaaaaaaaaaaaaaaaaaaaaaaaaaaaaaaaaaaaaaaaaaaaaaaaaaaaaaaaaaaaaaaaaaaaaaaaaaaaaaaaaaaaaaaaaaaaaaaaaaaaaaaaaaaaaaaaaaaaaaaaaaaaaaaaaaaaaaaaaaaaaaaaaaaaaaaaaaaaaaaaaaaaaaaaaaaaaaaaaaaaaaaaaaaaaaaaaaaaaaaaaaaaaaaaaaaaaaaaaaaaaaaaaaaaaaaaaaaaaaaaaaaaaaaaaaaaaaaaaaaaaaaaaaaaaaaaaaaaaaaaaaaaaaaaaaaaaaaaaaaaaaaaaaaaaaaaaaaaaaaaaaaaaaaaaaaaaaaaaaaaaaaaaaaaaaaaaaaaaaaaaaaaaaaaaaaaaaaaaaaaaaaaaaaaaaaaaaaaaaaaaaaaaaaaaaaaaaaaaaaaaaaaaaaaaaaaaaaaaaaaaaaaaaaaaaaaaaaaaaaaaaaaaaaaaaaaaaaaaaaaaaaaaaaaaaaaaaaaaaaaaaaaaaaaaaaaaaaaaaaaaaaaaaaaaaaaaaaaaaaaaaaaaaaaaaaaaaaaaaaaaaaaaaaaaaaaaaaaaaaaaaaaaaaaaaaaaaaaaaaaaaaaaaaaaaaaaaaaaaaaaaaaaaaaaaaaaaaaaaaaaaaaaaaaaaaaaaaaaaaaaaaaaaaaaaaaaaaaaaaaaaaaaaaaaaaaaaaaaaaaaaaaaaaaaaaaaaaaaaaaaaaaaaaaaaaaaaaaaaaaaaaaaaaaaaaaaaaaaaaaaaaaaaaaaaaaaaaaaaaaaaaaaaaaaaaaaaaaaaaaaaaaaaaaaaaaaaaaaaaaaaaaaaaaaaaaaaaaaaaaaaaaaaaaaaaaaaaaaaaaaaaaaaaaaaaaaaaaaaaaaaaaaaaaaaaaaaaaaaaaaaaaaaaaaaaaaaaaaaaaaaaaaaaaaaaaaaaaaaaaaaaaaaaaaaaaaaaaaaaaaaaaaaaaaaaaaaaaaaaaaaaaaaaaaaaaaaaaaaaaaaaaaaaaaaaaaaaaaaaaaaaaaaaaaaaaaaaaaaaaaaaaaaaaaaaaaaaaaaaaaaaaaaaaaaaaaaaaaaaaaaaaaaaaaaaaaaaaaaaaaaaaaaaaaaaaaaaaaaaaaaaaaaaaaaaaaaaaaaaaaaaaaaaaaaaaaaaaaaaaaaaaaaaaaaaaaaaaaaaaaaaaaaaaaaaaaaaaaaaaaaaaaaaaaaaaaaaaaaaaaaaaaaaaaaaaaaaaaaaaaaaaaaaaaaaaaaaaaaaaaaaaaaaaaaaaaaaaaaaaaaaaaaaaaaaaaaaaaaaaaaaaaaaaaaaaaaaaaaaaaaaaaaaaaaaaaaaaaaaaaaaaaaaaaaaaaaaaaaaaaaaaaaaaaaaaaaaaaaaaaaaaaaaaaaaaaaaaaaaaaaaaaaaaaaaaaaaaaaaaaaaaaaaaaaaaaaaaaaaaaaaaaaaaaaaaaaaaaaaaaaaaaaaaaaaaaaaaaaaaaaaaaaaaaaaaaaaaaaaaaaaaaaaaaaaaaaaaaaaaaaaaaaaaaaaaaaaaaaaaaaaaaaaaaaaaaaaaaaaaaaaaaaaaaaaaaaaaaaaaaaaaaaaaaaaaaaaaaaaaaaaaaaaaaaaaaaaaaaaaaaaaaaaaaaaaaaaaaaaaaaaaaaaaaaaaaaaaaaaaaaaaaaaaaaaaaaaaaaaaaaaaaaaaaaaaaaaaaaaaaaaaaaaaaaaaaaaaaaaaaaaaaaaaaaaaaaaaaaaaaaaaaaaaaaaaaaaaaaaaaaaaaaaaaaaaaaaaaaaaaaaaaaaaaaaaaaaaaaaaaaaaaaaaaaaaaaaaaaaaaaaaaaaaaaaaaaaaaaaaaaaaaaaaaaaaaaaaaaaaaaaaaaaaaaaaaaaaaaaaaaaaaaaaaaaaaaaaaaaaaaaaaaaaaaaaaaaaaaaaaaaaaaaaaaaaaaaaaaaaaaaaaaaaaaaaaaaaaaaaaaaaaaaaaaaaaaaaaaaaaaaaaaaaaaaaaaaaaaaaaaaaaaaaaaaaaaaaaaaaaaaaaaaaaaaaaaaaaaaaaaaaaaaaaaaaaaaaaaaaaaaaaaaaaaaaaaaaaaaaaaaaaaaaaaaaaaaaaaaaaaaaaaaaaaaaaaaaaaaaaaaaaaaaaaaaaaaaaaaaaaaaaaaaaaaaaaaaaaaaaaaaaaaaaaaaaaaaaaaaaaaaaaaaaaaaaaaaaaaaaaaaaaaaaaaaaaaaaaaaaaaaaaaaaaaaaaaaaaaaaaaaaaaaaaaaaaaaaaaaaaaaaaaaaaaaaaaaaaaaaaaaaaaaaaaaaaaaaaaaaaaaaaaaaaaaaaaaaaaaaaaaaaaaaaaaaaaaaaaaaaaaaaaaaaaaaaaaaaaaaaaaaaaaaaaaaaaaaaaaaaaaaaaaaaaaaaaaaaaaaaaaaaaaaaaaaaaaaaaaaaaaaaaaaaaaaaaaaaaaaaaaaaaaaaaaaaaaaaaaaaaaaaaaaaaaaaaaaaaaaaaaaaaaaaaaaaaaaaaaaaaaaaaaaaaaaaaaaaaaaaaaaaaaaaaaaaaaaaaaaaaaaaaaaaaaaaaaaaaaaaaaaaaaaaaaaaaaaaaaaaaaaaaaaaaaaaaaaaaaaaaaaaaaaaaaaaaaaaaaaaaaaaaaaaaaaaaaaaaaaaaaaaaaaaaaaaaaaaaaaaaaaaaaaaaaaaaaaaaaaaaaaaaaaaaaaaaaaaaaaaaaaaaaaaaaaaaaaaaaaaaaaaaaaaaaaaaaaaaaaaaaaaaaaaaaaaaaaaaaaaaaaaaaaaaaaaaaaaaaaaaaaaaaaaaaaaaaaaaaaaaaaaaaaaaaaaaaaaaaaaaaaaaaaaaaaaaaaaaaaaaaaaaaaaaaaaaaaaaaaaaaaaaaaaaaaaaaaaaaaaaaaaaaaaaaaaaaaaaaaaaaaaaaaaaaaaaaaaaaaaaaaaaaaaaaaaaaaaaaaaaaaaaaaaaaaaaaaaaaaaaaaaaaaaaaaaaaaaaaaaaaaaaaaaaaaaaaaaaaaaaaaaaaaaaaaaaaaaaaaaaaaaaaaaaaaaaaaaaaaaaaaaaaaaaaaaaaaaaaaaaaaaaaaaaaaaaaaaaaaaaaaaaaaaaaaaaaaaaaaaaaaaaaaaaaaaaaaaaaaaaaaaaaaaaaaaaaaaaaaaaaaaaaaaaaaaaaaaaaaaaaaaaaaaaaaaaaaaaaaaaaaaaaaaaaaaaaaaaaaaaaaaaaaaaaaaaaaaaaaaaaaaaaaaaaaaaaaaaaaaaaaaaaaaaaaaaaaaaaaaaaaaaaaaaaaaaaaaaaaaaaaaaaaaaaaaaaaaaaaaaaaaaaaaaaaaaaaaaaaaaaaaaaaaaaaaaaaaaaaaaaaaaaaaaaaaaaaaaaaaaaaaaaaaaaaaaaaaaaaaaaaaaaaaaaaaaaaaaaaaaaaaaaaaaaaaaaaaaaaaaaaaaaaaaaaaaaaaaaaaaaaaaaaaaaaaaaaaaaaaaaaaaaaaaaaaaaaaaaaaaaaaaaaaaaaaaaaaaaaaaaaaaaaaaaaaaaaaaaaaaaaaaaaaaaaaaaaaaaaaaaaaaaaaaaaaaaaaaaaaaaaaaaaaaaaaaaaaaaaaaaaaaaaaaaaaaaaaaaaaaaaaaaaaaaaaaaaaaaaaaaaaaaaaaaaaaaaaaaaaaaaaaaaaaaaaaaaaaaaaaaaaaaaaaaaaaaaaaaaaaaaaaaaaaaaaaaaaaaaaaaaaaaaaaaaaaaaaaaaaaaaaaaaaaaaaaaaaaaaaaaaaaaaaaaaaaaaaaaaaaaaaaaaaaaaaaaaaaaaaaaaaaaaaaaaaaaaaaaaaaaaaaaaaaaaaaaaaaaaaaaaaaaaaaaaaaaaaaaaaaaaaaaaaaaaa

SEQ ID NO: 31 - DNA, 100 bp, Artificial Sequence
  source: /note="Description of Artificial Sequence: Synthetic polynucleotide"
tttttttttttttttttttttttttttttttttttttttttttttttttttttttttttttttttttttttttttttttttttttttttttttttttttt

SEQ ID NO: 32 - DNA, 5000 bp, Artificial Sequence
  source: /note="Description of Artificial Sequence: Synthetic polynucleotide"
  misc_feature (1)..(5000): /note="This sequence may encompass 50-5000 nucleotides"
tttttttttttttttttttttttttttttttttttttttttttttttttttttttttttttttttttttttttttttttttttttttttttttttttttttttttttttttttttttttttttttttttttttttttttttttttttttttttttttttttttttttttttttttttttttttttttttttttttttttttttttttttttttttttttttttttttttttttttttttttttttttttttttttttttttttttttttttttttttttttttttttttttttttttttttttttttttttttttttttttttttttttttttttttttttttttttttttttttttttttttttttttttttttttttttttttttttttttttttttttttttttttttttttttttttttttttttttttttttttttttttttttttttttttttttttttttttttttttttttttttttttttttttttttttttttttttttttttttttttttttttttttttttttttttttttttttttttttttttttttttttttttttttttttttttttttttttttttttttttttttttttttttttttttttttttttttttttttttttttttttttttttttttttttttttttttttttttttttttttttttttttttttttttttttttttttttttttttttttttttttttttttttttttttttttttttttttttttttttttttttttttttttttttttttttttttttttttttttttttttttttttttttttttttttttttttttttttttttttttttttttttttttttttttttttttttttttttttttttttttttttttttttttttttttttttttttttttttttttttttttttttttttttttttttttttttttttttttttttttttttttttttttttttttttttttttttttttttttttttttttttttttttttttttttttttttttttttttttttttttttttttttttttttttttttttttttttttttttttttttttttttttttttttttttttttttttttttttttttttttttttttttttttttttttttttttttttttttttttttttttttttttttttttttttttttttttttttttttttttttttttttttttttttttttttttttttttttttttttttttttttttttttttttttttttttttttttttttttttttttttttttttttttttttttttttttttttttttttttttttttttttttttttttttttttttttttttttttttttttttttttttttttttttttttttttttttttttttttttttttttttttttttttttttttttttttttttttttttttttttttttttttttttttttttttttttttttttttttttttttttttttttttttttttttttttttttttttttttttttttttttttttttttttttttttttttttttttttttttttttttttttttttttttttttttttttttttttttttttttttttttttttttttttttttttttttttttttttttttttttttttttttttttttttttttttttttttttttttttttttttttttttttttttttttttttttttttttttttttttttttttttttttttttttttttttttttttttttttttttttttttttttttttttttttttttttttttttttttttttttttttttttttttttttttttttttttttttttttttttttttttttttttttttttttttttttttttttttttttttttttttttttttttttttttttttttttttttttttttttttttttttttttttttttttttttttttttttttttttttttttttttttttttttttttttttttttttttttttttttttttttttttttttttttttttttttttttttttttttttttttttttttttttttttttttttttttttttttttttttttttttttttttttttttttttttttttttttttttttttttttttttttttttttttttttttttttttttttttttttttttttttttttttttttttttttttttttttttttttttttttttttttttttttttttttttttttttttttttttttttttttttttttttttttttttttttttttttttttttttttttttttttttttttttttttttttttttttttttttttttttttttttttttttttttttttttttttttttttttttttttttttttttttttttttttttttttttttttttttttttttttttttttttttttttttttttttttttttttttttttttttttttttttttttttttttttttttttttttttttttttttttttttttttttttttttttttttttttttttttttttttttttttttttttttttttttttttttttttttttttttttttttttttttttttttttttttttttttttttttttttttttttttttttttttttttttttttttttttttttttttttttttttttttttttttttttttttttttttttttttttttttttttttttttttttttttttttttttttttttttttttttttttttttttttttttttttttttttttttttttttttttttttttttttttttttttttttttttttttttttttttttttttttttttttttttttttttttttttttttttttttttttttttttttttttttttttttttttttttttttttttttttttttttttttttttttttttttttttttttttttttttttttttttttttttttttttttttttttttttttttttttttttttttttttttttttttttttttttttttttttttttttttttttttttttttttttttttttttttttttttttttttttttttttttttttttttttttttttttttttttttttttttttttttttttttttttttttttttttttttttttttttttttttttttttttttttttttttttttttttttttttttttttttttttttttttttttttttttttttttttttttttttttttttttttttttttttttttttttttttttttttttttttttttttttttttttttttttttttttttttttttttttttttttttttttttttttttttttttttttttttttttttttttttttttttttttttttttttttttttttttttttttttttttttttttttttttttttttttttttttttttttttttttttttttttttttttttttttttttttttttttttttttttttttttttttttttttttttttttttttttttttttttttttttttttttttttttttttttttttttttttttttttttttttttttttttttttttttttttttttttttttttttttttttttttttttttttttttttttttttttttttttttttttttttttttttttttttttttttttttttttttttttttttttttttttttttttttttttttttttttttttttttttttttttttttttttttttttttttttttttttttttttttttttttttttttttttttttttttttttttttttttttttttttttttttttttttttttttttttttttttttttttttttttttttttttttttttttttttttttttttttttttttttttttttttttttttttttttttttttttttttttttttttttttttttttttttttttttttttttttttttttttttttttttttttttttttttttttttttttttttttttttttttttttttttttttttttttttttttttttttttttttttttttttttttttttttttttttttttttttttttttttttttttttttttttttttttttttttttttttttttttttttttttttttttttttttttttttttttttttttttttttttttttttttttttttttttttttttttttttttttttttttttttttttttttttttttttttttttttttttttttttttttttttttttttttttttttttttttttttttttttttttttttttttttttttttttttttttttttttttttttttttttttttttttttttttttttttttttttttttttttttttttttttttttttttttttttttttttttttttttttttttttttttttttttttttttttttttttttttttttttttttttttttttttttttttttttttttttttttttttttttttttttttttttttttttttttttttttttttttttttttttttttttttttttttttttttttttttttttttttttttttttttttttttttttttttttttttttttttttttttttttttttttttttttttttttttttttttttttttttttttttttttttttttttttttttttttttttttttttttttttttttttttttttttttttttttttttttttttttttttttttttttttttttttttttttttttttttttttttttttttttttttttttttttttttttttttttttttttttttttttttttttttttttttttttttttttttttttttttttttttttttttttttttttttttttttttttttttttttttttttttttttttttttttttttttttttttttttttttttttttttttttttttttttttttttttttttttttttttttttttttttttttttttttttttttttttttttttttttttttttttttttttttttttttttttttttttt

SEQ ID NO: 33 - DNA, 5000 bp, Artificial Sequence; identical to SEQ ID NO: 30
  source: /note="Description of Artificial Sequence: Synthetic polynucleotide"
  misc_feature (1)..(5000): /note="This sequence may encompass 100-5000 nucleotides"

SEQ ID NO: 34 - DNA, 400 bp, Artificial Sequence
  source: /note="Description of Artificial Sequence: Synthetic polynucleotide"
  misc_feature (1)..(400): /note="This sequence may encompass 100-400 nucleotides"
aaaaaaaaaaaaaaaaaaaaaaaaaaaaaaaaaaaaaaaaaaaaaaaaaaaaaaaaaaaaaaaaaaaaaaaaaaaaaaaaaaaaaaaaaaaaaaaaaaaaaaaaaaaaaaaaaaaaaaaaaaaaaaaaaaaaaaaaaaaaaaaaaaaaaaaaaaaaaaaaaaaaaaaaaaaaaaaaaaaaaaaaaaaaaaaaaaaaaaaaaaaaaaaaaaaaaaaaaaaaaaaaaaaaaaaaaaaaaaaaaaaaaaaaaaaaaaaaaaaaaaaaaaaaaaaaaaaaaaaaaaaaaaaaaaaaaaaaaaaaaaaaaaaaaaaaaaaaaaaaaaaaaaaaaaaaaaaaaaaaaaaaaaaaaaaaaaaaaaaaaaaaaaaaaaaaaaaaaaaaaaaaaaaaaaaaaaaaaaaa

SEQ ID NO: 35 - DNA, 2000 bp, Artificial Sequence
  source: /note="Description of Artificial Sequence: Synthetic polynucleotide"
  misc_feature (1)..(2000): /note="This sequence may encompass 50-2000 nucleotides"
aaaaaaaaaaaaaaaaaaaaaaaaaaaaaaaaaaaaaaaaaaaaaaaaaaaaaaaaaaaaaaaaaaaaaaaaaaaaaaaaaaaaaaaaaaaaaaaaaaaaaaaaaaaaaaaaaaaaaaaaaaaaaaaaaaaaaaaaaaaaaaaaaaaaaaaaaaaaaaaaaaaaaaaaaaaaaaaaaaaaaaaaaaaaaaaaaaaaaaaaaaaaaaaaaaaaaaaaaaaaaaaaaaaaaaaaaaaaaaaaaaaaaaaaaaaaaaaaaaaaaaaaaaaaaaaaaaaaaaaaaaaaaaaaaaaaaaaaaaaaaaaaaaaaaaaaaaaaaaaaaaaaaaaaaaaaaaaaaaaaaaaaaaaaaaaaaaaaaaaaaaaaaaaaaaaaaaaaaaaaaaaaaaaaaaaaaaaaaaaaaaaaaaaaaaaaaaaaaaaaaaaaaaaaaaaaaaaaaaaaaaaaaaaaaaaaaaaaaaaaaaaaaaaaaaaaaaaaaaaaaaaaaaaaaaaaaaaaaaaaaaaaaaaaaaaaaaaaaaaaaaaaaaaaaaaaaaaaaaaaaaaaaaaaaaaaaaaaaaaaaaaaaaaaaaaaaaaaaaaaaaaaaaaaaaaaaaaaaaaaaaaaaaaaaaaaaaaaaaaaaaaaaaaaaaaaaaaaaaaaaaaaaaaaaaaaaaaaaaaaaaaaaaaaaaaaaaaaaaaaaaaaaaaaaaaaaaaaaaaaaaaaaaaaaaaaaaaaaaaaaaaaaaaaaaaaaaaaaaaaaaaaaaaaaaaaaaaaaaaaaaaaaaaaaaaaaaaaaaaaaaaaaaaaaaaaaaaaaaaaaaaaaaaaaaaaaaaaaaaaaaaaaaaaaaaaaaaaaaaaaaaaaaaaaaaaaaaaaaaaaaaaaaaaaaaaaaaaaaaaaaaaaaaaaaaaaaaaaaaaaaaaaaaaaaaaaaaaaaaaaaaaaaaaaaaaaaaaaaaaaaaaaaaaaaaaaaaaaaaaaaaaaaaaaaaaaaaaaaaaaaaaaaaaaaaaaaaaaaaaaaaaaaaaaaaaaaaaaaaaaaaaaaaaaaaaaaaaaaaaaaaaaaaaaaaaaaaaaaaaaaaaaaaaaaaaaaaaaaaaaaaaaaaaaaaaaaaaaaaaaaaaaaaaaaaaaaaaaaaaaaaaaaaaaaaaaaaaaaaaaaaaaaaaaaaaaaaaaaaaaaaaaaaaaaaaaaaaaaaaaaaaaaaaaaaaaaaaaaaaaaaaaaaaaaaaaaaaaaaaaaaaaaaaaaaaaaaaaaaaaaaaaaaaaaaaaaaaaaaaaaaaaaaaaaaaaaaaaaaaaaaaaaaaaaaaaaaaaaaaaaaaaaaaaaaaaaaaaaaaaaaaaaaaaaaaaaaaaaaaaaaaaaaaaaaaaaaaaaaaaaaaaaaaaaaaaaaaaaaaaaaaaaaaaaaaaaaaaaaaaaaaaaaaaaaaaaaaaaaaaaaaaaaaaaaaaaaaaaaaaaaaaaaaaaaaaaaaaaaaaaaaaaaaaaaaaaaaaaaaaaaaaaaaaaaaaaaaaaaaaaaaaaaaaaaaaaaaaaaaaaaaaaaaaaaaaaaaaaaaaaaaaaaaaaaaaaaaaaaaaaaaaaaaaaaaaaaaaaaaaaaaaaaaaaaaaaaaaaaaaaaaaaaaaaaaaaaaaaaaaaaaaaaaaaaaaaaaaaaaaaaaaaaaaaaaaaaaaaaaaaaaaaaaaaaaaaaaaaaaaaaaaaaaaaaaaaaaaaaaaaaaaaaaaaaaaaaaaaaaaaaaaaaaaaaaaaaaaaaaaaaaaaaaaaaaaaaaaaaaaaaaaaaaaaaaaaaaaaaaaaaaaaaaaaaaaaaaaaaaaaaaaaaaaaaaaaaaaaaaaaaaaaaaaaaaaaaaaaaaaaaaaaaaaaaaaaaaaaaaaaaaaaaaaaaaaaaaaaaaaaaaaaaaaaaaaaaaaaaaaaaaaaaaaaaaaaaaaaaaaaaaaaaaaaaaaaaaaaaaaaaaaaaaaaaaaaaaaaaaaaaaaaaaaaaaaaaaaaaaaaaaaaaaaaaaaaaaaaaa

SEQ ID NO: 36 - protein, 41 aa, Artificial Sequence
  source: /note="Description of Artificial Sequence: Synthetic polypeptide"
RSKRSRLLHSDYMNMTPRRPGPTRKHYQPYAPPRDFAAYRS

SEQ ID NO: 37 - DNA, 123 bp, Artificial Sequence; identical to SEQ ID NO: 19
  source: /note="Description of Artificial Sequence: Synthetic polynucleotide"

SEQ ID NO: 38 - protein, 35 aa, Artificial Sequence
  source: /note="Description of Artificial Sequence: Synthetic polypeptide"
TKKKYSSSVHDPNGEYMFMRAVNTAKKSRLTDVTL

SEQ ID NO: 39 - DNA, 30 bp, Artificial Sequence
  source: /note="Description of Artificial Sequence: Synthetic oligonucleotide"
ggtggcggaggttctggaggtgggggttcc

SEQ ID NO: 40 - protein, 4 aa, Artificial Sequence
  source: /note="Description of Artificial Sequence: Synthetic peptide"
GGGS

SEQ ID NO: 41 - protein, 40 aa, Artificial Sequence
  source: /note="Description of Artificial Sequence: Synthetic polypeptide"
  MISC_FEATURE (1)..(40): /note="This sequence may encompass 1-10 "Gly Gly Gly Ser" repeating units"
GGGSGGGSGGGSGGGSGGGSGGGSGGGSGGGSGGGSGGGS

SEQ ID NO: 42 - protein, 18 aa, Artificial Sequence
  source: /note="Description of Artificial Sequence: Synthetic peptide"
GSTSGSGKPGSGEGSTKG

SEQ ID NO: 43 - protein, 35 aa, Artificial Sequence
  source: /note="Description of Artificial Sequence: Synthetic polypeptide"
TKKKYSSSVHDPNGEFMFMRAVNTAKKSRLTDVTL

SEQ ID NO: 44 - DNA, 105 bp, Artificial Sequence
  source: /note="Description of Artificial Sequence: Synthetic polynucleotide"
acaaaaaagaagtattcatccagtgtgcacgaccctaacggtgaatacatgttcatgagagcagtgaacacagccaaaaaatccagactcacagatgtgacccta

SEQ ID NO: 45 - protein, 242 aa, Artificial Sequence
  source: /note="Description of Artificial Sequence: Synthetic polypeptide"
EIVMTQSPATLSLSPGERATLSCRASQDISKYLNWYQQKPGQAPRLLIYHTSRLHSGIPARFSGSGSGTDYTLTISSLQPEDFAVYFCQQGNTLPYTFGQGTKLEIKGGGGSGGGGSGGGGSQVQLQESGPGLVKPSETLSLTCTVSGVSLPDYGVSWIRQPPGKGLEWIGVIWGSETTYYSSSLKSRVTISKDNSKNQVSLKLSSVTAADTAVYYCAKHYYYGGSYAMDYWGQGTLVTVSS

SEQ ID NO: 46 - protein, 242 aa, Artificial Sequence
  source: /note="Description of Artificial Sequence: Synthetic polypeptide"
EIVMTQSPATLSLSPGERATLSCRASQDISKYLNWYQQKPGQAPRLLIYHTSRLHSGIPARFSGSGSGTDYTLTISSLQPEDFAVYFCQQGNTLPYTFGQGTKLEIKGGGGSGGGGSGGGGSQVQLQESGPGLVKPSETLSLTCTVSGVSLPDYGVSWIRQPPGKGLEWIGVIWGSETTYYQSSLKSRVTISKDNSKNQVSLKLSSVTAADTAVYYCAKHYYYGGSYAMDYWGQGTLVTVSS

SEQ ID NO: 47 - protein, 242 aa, Artificial Sequence
  source: /note="Description of Artificial Sequence: Synthetic polypeptide"
QVQLQESGPGLVKPSETLSLTCTVSGVSLPDYGVSWIRQPPGKGLEWIGVIWGSETTYYSSSLKSRVTISKDNSKNQVSLKLSSVTAADTAVYYCAKHYYYGGSYAMDYWGQGTLVTVSSGGGGSGGGGSGGGGSEIVMTQSPATLSLSPGERATLSCRASQDISKYLNWYQQKPGQAPRLLIYHTSRLHSGIPARFSGSGSGTDYTLTISSLQPEDFAVYFCQQGNTLPYTFGQGTKLEIK

SEQ ID NO: 48 - protein, 242 aa, Artificial Sequence
  source: /note="Description of Artificial Sequence: Synthetic polypeptide"
QVQLQESGPGLVKPSETLSLTCTVSGVSLPDYGVSWIRQPPGKGLEWIGVIWGSETTYYQSSLKSRVTISKDNSKNQVSLKLSSVTAADTAVYYCAKHYYYGGSYAMDYWGQGTLVTVSSGGGGSGGGGSGGGGSEIVMTQSPATLSLSPGERATLSCRASQDISKYLNWYQQKPGQAPRLLIYHTSRLHSGIPARFSGSGSGTDYTLTISSLQPEDFAVYFCQQGNTLPYTFGQGTKLEIK

SEQ ID NO: 49 - protein, 247 aa, Artificial Sequence
  source: /note="Description of Artificial Sequence: Synthetic polypeptide"
EIVMTQSPATLSLSPGERATLSCRASQDISKYLNWYQQKPGQAPRLLIYHTSRLHSGIPARFSGSGSGTDYTLTISSLQPEDFAVYFCQQGNTLPYTFGQGTKLEIKGGGGSGGGGSGGGGSGGGGSQVQLQESGPGLVKPSETLSLTCTVSGVSLPDYGVSWIRQPPGKGLEWIGVIWGSETTYYSSSLKSRVTISKDNSKNQVSLKLSSVTAADTAVYYCAKHYYYGGSYAMDYWGQGTLVTVSS

SEQ ID NO: 50 - protein, 247 aa, Artificial Sequence
  source: /note="Description of Artificial Sequence: Synthetic polypeptide"
EIVMTQSPATLSLSPGERATLSCRASQDISKYLNWYQQKPGQAPRLLIYHTSRLHSGIPARFSGSGSGTDYTLTISSLQPEDFAVYFCQQGNTLPYTFGQGTKLEIKGGGGSGGGGSGGGGSGGGGSQVQLQESGPGLVKPSETLSLTCTVSGVSLPDYGVSWIRQPPGKGLEWIGVIWGSETTYYQSSLKSRVTISKDNSKNQVSLKLSSVTAADTAVYYCAKHYYYGGSYAMDYWGQGTLVTVSS

SEQ ID NO: 51 - protein, 247 aa, Artificial Sequence
  source: /note="Description of Artificial Sequence: Synthetic polypeptide"
QVQLQESGPGLVKPSETLSLTCTVSGVSLPDYGVSWIRQPPGKGLEWIGVIWGSETTYYSSSLKSRVTISKDNSKNQVSLKLSSVTAADTAVYYCAKHYYYGGSYAMDYWGQGTLVTVSSGGGGSGGGGSGGGGSGGGGSEIVMTQSPATLSLSPGERATLSCRASQDISKYLNWYQQKPGQAPRLLIYHTSRLHSGIPARFSGSGSGTDYTLTISSLQPEDFAVYFCQQGNTLPYTFGQGTKLEIK

SEQ ID NO: 52 - protein, 247 aa, Artificial Sequence
  source: /note="Description of Artificial Sequence: Synthetic polypeptide"
QVQLQESGPGLVKPSETLSLTCTVSGVSLPDYGVSWIRQPPGKGLEWIGVIWGSETTYYQSSLKSRVTISKDNSKNQVSLKLSSVTAADTAVYYCAKHYYYGGSYAMDYWGQGTLVTVSSGGGGSGGGGSGGGGSGGGGSEIVMTQSPATLSLSPGERATLSCRASQDISKYLNWYQQKPGQAPRLLIYHTSRLHSGIPARFSGSGSGTDYTLTISSLQPEDFAVYFCQQGNTLPYTFGQGTKLEIK

SEQ ID NO: 53 - protein, 247 aa, Artificial Sequence
  source: /note="Description of Artificial Sequence: Synthetic polypeptide"
EIVMTQSPATLSLSPGERATLSCRASQDISKYLNWYQQKPGQAPRLLIYHTSRLHSGIPARFSGSGSGTDYTLTISSLQPEDFAVYFCQQGNTLPYTFGQGTKLEIKGGGGSGGGGSGGGGSGGGGSQVQLQESGPGLVKPSETLSLTCTVSGVSLPDYGVSWIRQPPGKGLEWIGVIWGSETTYYNSSLKSRVTISKDNSKNQVSLKLSSVTAADTAVYYCAKHYYYGGSYAMDYWGQGTLVTVSS

SEQ ID NO: 54 - protein, 247 aa, Artificial Sequence
  source: /note="Description of Artificial Sequence: Synthetic polypeptide"
QVQLQESGPGLVKPSETLSLTCTVSGVSLPDYGVSWIRQPPGKGLEWIGVIWGSETTYYNSSLKSRVTISKDNSKNQVSLKLSSVTAADTAVYYCAKHYYYGGSYAMDYWGQGTLVTVSSGGGGSGGGGSGGGGSGGGGSEIVMTQSPATLSLSPGERATLSCRASQDISKYLNWYQQKPGQAPRLLIYHTSRLHSGIPARFSGSGSGTDYTLTISSLQPEDFAVYFCQQGNTLPYTFGQGTKLEIK

SEQ ID NO: 55 - protein, 242 aa, Artificial Sequence
  source: /note="Description of Artificial Sequence: Synthetic polypeptide"
EIVMTQSPATLSLSPGERATLSCRASQDISKYLNWYQQKPGQAPRLLIYHTSRLHSGIPARFSGSGSGTDYTLTISSLQPEDFAVYFCQQGNTLPYTFGQGTKLEIKGGGGSGGGGSGGGGSQVQLQESGPGLVKPSETLSLTCTVSGVSLPDYGVSWIRQPPGKGLEWIGVIWGSETTYYNSSLKSRVTISKDNSKNQVSLKLSSVTAADTAVYYCAKHYYYGGSYAMDYWGQGTLVTVSS

SEQ ID NO: 56 - protein, 242 aa, Artificial Sequence
  source: /note="Description of Artificial Sequence: Synthetic polypeptide"
QVQLQESGPGLVKPSETLSLTCTVSGVSLPDYGVSWIRQPPGKGLEWIGVIWGSETTYYNSSLKSRVTISKDNSKNQVSLKLSSVTAADTAVYYCAKHYYYGGSYAMDYWGQGTLVTVSSGGGGSGGGGSGGGGSEIVMTQSPATLSLSPGERATLSCRASQDISKYLNWYQQKPGQAPRLLIYHTSRLHSGIPARFSGSGSGTDYTLTISSLQPEDFAVYFCQQGNTLPYTFGQGTKLEIK

SEQ ID NO: 57 - DNA, 813 bp, Artificial Sequence
  source: /note="Description of Artificial Sequence: Synthetic polynucleotide"
atggccctccctgtcaccgccctgctgcttccgctggctcttctgctccacgccgctcggcccgaaattgtgatgacccagtcacccgccactcttagcctttcacccggtgagcgcgcaaccctgtcttgcagagcctcccaagacatctcaaaataccttaattggtatcaacagaagcccggacaggctcctcgccttctgatctaccacaccagccggctccattctggaatccctgccaggttcagcggtagcggatctgggaccgactacaccctcactatcagctcactgcagccagaggacttcgctgtctatttctgtcagcaagggaacaccctgccctacacctttggacagggcaccaagctcgagattaaaggtggaggtggcagcggaggaggtgggtccggcggtggaggaagccaggtccaactccaagaaagcggaccgggtcttgtgaagccatcagaaactctttcactgacttgtactgtgagcggagtgtctctccccgattacggggtgtcttggatcagacagccaccggggaagggtctggaatggattggagtgatttggggctctgagactacttactactcttcatccctcaagtcacgcgtcaccatctcaaaggacaactctaagaatcaggtgtcactgaaactgtcatctgtgaccgcagccgacaccgccgtgtactattgcgctaagcattactattatggcgggagctacgcaatggattactggggacagggtactctggtcaccgtgtccagccaccaccatcatcaccatcaccat

SEQ ID NO: 58 - DNA, 813 bp, Artificial Sequence
  source: /note="Description of Artificial Sequence: Synthetic polynucleotide"
atggccctccctgtcaccgccctgctgcttccgctggctcttctgctccacgccgctcggcccgaaattgtgatgacccagtcacccgccactcttagcctttcacccggtgagcgcgcaaccctgtcttgcagagcctcccaagacatctcaaaataccttaattggtatcaacagaagcccggacaggctcctcgccttctgatctaccacaccagccggctccattctggaatccctgccaggttcagcggtagcggatctgggaccgactacaccctcactatcagctcactgcagccagaggacttcgctgtctatttctgtcagcaagggaacaccctgccctacacctttggacagggcaccaagctcgagattaaaggtggaggtggcagcggaggaggtgggtccggcggtggaggaagccaggtccaactccaagaaagcggaccgggtcttgtgaagccatcagaaactctttcactgacttgtactgtgagcggagtgtctctccccgattacggggtgtcttggatcagacagccaccggggaagggtctggaatggattggagtgatttggggctctgagactacttactaccaatcatccctcaagtcacgcgtcaccatctcaaaggacaactctaagaatcaggtgtcactgaaactgtcatctgtgaccgcagccgacaccgccgtgtactattgcgctaagcattactattatggcgggagctacgcaatggattactggggacagggtactctggtcaccgtgtccagccaccaccatcatcaccatcaccat

SEQ ID NO: 59 - DNA, 813 bp, Artificial Sequence
  source: /note="Description of Artificial Sequence: Synthetic polynucleotide"
atggctctgcccgtgaccgcactcctcctgccactggctctgctgcttcacgccgctcgcccacaagtccagcttcaagaatcagggcctggtctggtgaagccatctgagactctgtccctcacttgcaccgtgagcggagtgtccctcccagactacggagtgagctggattagacagcctcccggaaagggactggagtggatcggagtgatttggggtagcgaaaccacttactattcatcttccctgaagtcacgggtcaccatttcaaaggataactcaaagaatcaagtgagcctcaagctctcatcagtcaccgccgctgacaccgccgtgtattactgtgccaagcattactactatggagggtcctacgccatggactactggggccagggaactctggtcactgtgtcatctggtggaggaggtagcggaggaggcgggagcggtggaggtggctccgaaatcgtgatgacccagagccctgcaaccctgtccctttctcccggggaacgggctaccctttcttgtcgggcatcacaagatatctcaaaatacctcaattggtatcaacagaagccgggacaggcccctaggcttcttatctaccacacctctcgcctgcatagcgggattcccgcacgctttagcgggtctggaagcgggaccgactacactctgaccatctcatctctccagcccgaggacttcgccgtctacttctgccagcagggtaacaccctgccgtacaccttcggccagggcaccaagcttgagatcaaacatcaccaccatcatcaccatcac

SEQ ID NO: 60 - DNA, 813 bp, Artificial Sequence
  source: /note="Description of Artificial Sequence: Synthetic polynucleotide"
atggctctgcccgtgaccgcactcctcctgccactggctctgctgcttcacgccgctcgcccacaagtccagcttcaagaatcagggcctggtctggtgaagccatctgagactctgtccctcacttgcaccgtgagcggagtgtccctcccagactacggagtgagctggattagacagcctcccggaaagggactggagtggatcggagtgatttggggtagcgaaaccacttactatcaatcttccctgaagtcacgggtcaccatttcaaaggataactcaaagaatcaagtgagcctcaagctctcatcagtcaccgccgctgacaccgccgtgtattactgtgccaagcattactactatggagggtcctacgccatggactactggggccagggaactctggtcactgtgtcatctggtggaggaggtagcggaggaggcgggagcggtggaggtggctccgaaatcgtgatgacccagagccctgcaaccctgtccctttctcccggggaacgggctaccctttcttgtcgggcatcacaagatatctcaaaatacctcaattggtatcaacagaagccgggacaggcccctaggcttcttatctaccacacctctcgcctgcatagcgggattcccgcacgctttagcgggtctggaagcgggaccgactacactctgaccatctcatctctccagcccgaggacttcgccgtctacttctgccagcagggtaacaccctgccgtacaccttcggccagggcaccaagcttgagatcaaacatcaccaccatcatcaccatcac

SEQ ID NO: 61 - DNA, 828 bp, Artificial Sequence
  source: /note="Description of Artificial Sequence: Synthetic polynucleotide"
atggccctcccagtgaccgctctgctgctgcctctcgcacttcttctccatgccgctcggcctgagatcgtcatgacccaaagccccgctaccctgtccctgtcacccggcgagagggcaaccctttcatgcagggccagccaggacatttctaagtacctcaactggtatcagcagaagccagggcaggctcctcgcctgctgatctaccacaccagccgcctccacagcggtatccccgccagattttccgggagcgggtctggaaccgactacaccctcaccatctcttctctgcagcccgaggatttcgccgtctatttctgccagcaggggaatactctgccgtacaccttcggtcaaggtaccaagctggaaatcaagggaggcggaggatcaggcggtggcggaagcggaggaggtggctccggaggaggaggttcccaagtgcagcttcaagaatcaggacccggacttgtgaagccatcagaaaccctctccctgacttgtaccgtgtccggtgtgagcctccccgactacggagtctcttggattcgccagcctccggggaagggtcttgaatggattggggtgatttggggatcagagactacttactactcttcatcacttaagtcacgggtcaccatcagcaaagataatagcaagaaccaagtgtcacttaagctgtcatctgtgaccgccgctgacaccgccgtgtactattgtgccaaacattactattacggagggtcttatgctatggactactggggacaggggaccctggtgactgtctctagccatcaccatcaccaccatcatcac

SEQ ID NO: 62 - DNA, 828 bp, Artificial Sequence
  source: /note="Description of Artificial Sequence: Synthetic polynucleotide"
atggccctcccagtgaccgctctgctgctgcctctcgcacttcttctccatgccgctcggcctgagatcgtcatgacccaaagccccgctaccctgtccctgtcacccggcgagagggcaaccctttcatgcagggccagccaggacatttctaagtacctcaactggtatcagcagaagccagggcaggctcctcgcctgctgatctaccacaccagccgcctccacagcggtatccccgccagattttccgggagcgggtctggaaccgactacaccctcaccatctcttctctgcagcccgaggatttcgccgtctatttctgccagcaggggaatactctgccgtacaccttcggtcaaggtaccaagctggaaatcaagggaggcggaggatcaggcggtggcggaagcggaggaggtggctccggaggaggaggttcccaagtgcagcttcaagaatcaggacccggacttgtgaagccatcagaaaccctctccctgacttgtaccgtgtccggtgtgagcctccccgactacggagtctcttggattcgccagcctccggggaagggtcttgaatggattggggtgatttggggatcagagactacttactaccagtcatcacttaagtcacgggtcaccatcagcaaagataatagcaagaaccaagtgtcacttaagctgtcatctgtgaccgccgctgacaccgccgtgtactattgtgccaaacattactattacggagggtcttatgctatggactactggggacaggggaccctggtgactgtctctagccatcaccatcaccaccatcatcac

SEQ ID NO: 63 - DNA, 828 bp, Artificial Sequence
  source: /note="Description of Artificial Sequence: Synthetic polynucleotide"
atggcactgcctgtcactgccctcctgctgcctctggccctccttctgcatgccgccaggccccaagtccagctgcaagagtcaggacccggactggtgaagccgtctgagactctctcactgacttgtaccgtcagcggcgtgtccctccccgactacggagtgtcatggatccgccaacctcccgggaaagggcttgaatggattggtgtcatctggggttctgaaaccacctactactcatcttccctgaagtccagggtgaccatcagcaaggataattccaagaaccaggtcagccttaagctgtcatctgtgaccgctgctgacaccgccgtgtattactgcgccaagcactactattacggaggaagctacgctatggactattggggacagggcactctcgtgactgtgagcagcggcggtggagggtctggaggtggaggatccggtggtggtgggtcaggcggaggagggagcgagattgtgatgactcagtcaccagccaccctttctctttcacccggcgagagagcaaccctgagctgtagagccagccaggacatttctaagtacctcaactggtatcagcaaaaaccggggcaggcccctcgcctcctgatctaccatacctcacgccttcactctggtatccccgctcggtttagcggatcaggatctggtaccgactacactctgaccatttccagcctgcagccagaagatttcgcagtgtatttctgccagcagggcaatacccttccttacaccttcggtcagggaaccaagctcgaaatcaagcaccatcaccatcatcaccaccat

SEQ ID NO: 64 - DNA, 828 bp, Artificial Sequence
  source: /note="Description of Artificial Sequence: Synthetic polynucleotide"
atggcactgcctgtcactgccctcctgctgcctctggccctccttctgcatgccgccaggccccaagtccagctgcaagagtcaggacccggactggtgaagccgtctgagactctctcactgacttgtaccgtcagcggcgtgtccctccccgactacggagtgtcatggatccgccaacctcccgggaaagggcttgaatggattggtgtcatctggggttctgaaaccacctactaccagtcttccctgaagtccagggtgaccatcagcaaggataattccaagaaccaggtcagccttaagctgtcatctgtgaccgctgctgacaccgccgtgtattactgcgccaagcactactattacggaggaagctacgctatggactattggggacagggcactctcgtgactgtgagcagcggcggtggagggtctggaggtggaggatccggtggtggtgggtcaggcggaggagggagcgagattgtgatgactcagtcaccagccaccctttctctttcacccggcgagagagcaaccctgagctgtagagccagccaggacatttctaagtacctcaactggtatcagcaaaaaccggggcaggcccctcgcctcctgatctaccatacctcacgccttcactctggtatccccgctcggtttagcggatcaggatctggtaccgactacactctgaccatttccagcctgcagccagaagatttcgcagtgtatttctgccagcagggcaatacccttccttacaccttcggtcagggaaccaagctcgaaatcaagcaccatcaccatcatcatcaccac

SEQ ID NO: 65 - DNA, 828 bp, Artificial Sequence
  source: /note="Description of Artificial Sequence: Synthetic polynucleotide"
atggccctcccagtgaccgctctgctgctgcctctcgcacttcttctccatgccgctcggcctgagatcgtcatgacccaaagccccgctaccctgtccctgtcacccggcgagagggcaaccctttcatgcagggccagccaggacatttctaagtacctcaactggtatcagcagaagccagggcaggctcctcgcctgctgatctaccacaccagccgcctccacagcggtatccccgccagattttccgggagcgggtctggaaccgactacaccctcaccatctcttctctgcagcccgaggatttcgccgtctatttctgccagcaggggaatactctgccgtacaccttcggtcaaggtaccaagctggaaatcaagggaggcggaggatcaggcggtggcggaagcggaggaggtggctccggaggaggaggttcccaagtgcagcttcaagaatcaggacccggacttgtgaagccatcagaaaccctctccctgacttgtaccgtgtccggtgtgagcctccccgactacggagtctcttggattcgccagcctccggggaagggtcttgaatggattggggtgatttggggatcagagactacttactacaattcatcacttaagtcacgggtcaccatcagcaaagataatagcaagaaccaagtgtcacttaagctgtcatctgtgaccgccgctgacaccgccgtgtactattgtgccaaacattactattacggagggtcttatgctatggactactggggacaggggaccctggtgactgtctctagccatcaccatcaccaccatcatcac

SEQ ID NO: 66 - DNA, 828 bp, Artificial Sequence
  source: /note="Description of Artificial Sequence: Synthetic polynucleotide"
atggcactgcctgtcactgccctcctgctgcctctggccctccttctgcatgccgccaggccccaagtccagctgcaagagtcaggacccggactggtgaagccgtctgagactctctcactgacttgtaccgtcagcggcgtgtccctccccgactacggagtgtcatggatccgccaacctcccgggaaagggcttgaatggattggtgtcatctggggttctgaaaccacctactacaactcttccctgaagtccagggtgaccatcagcaaggataattccaagaaccaggtcagccttaagctgtcatctgtgaccgctgctgacaccgccgtgtattactgcgccaagcactactattacggaggaagctacgctatggactattggggacagggcactctcgtgactgtgagcagcggcggtggagggtctggaggtggaggatccggtggtggtgggtcaggcggaggagggagcgagattgtgatgactcagtcaccagccaccctttctctttcacccggcgagagagcaaccctgagctgtagagccagccaggacatttctaagtacctcaactggtatcagcaaaaaccggggcaggcccctcgcctcctgatctaccatacctcacgccttcactctggtatccccgctcggtttagcggatcaggatctggtaccgactacactctgaccatttccagcctgcagccagaagatttcgcagtgtatttctgccagcagggcaatacccttccttacaccttcggtcagggaaccaagctcgaaatcaagcaccatcaccatcatcaccaccat

SEQ ID NO: 67 - DNA, 813 bp, Artificial Sequence
  source: /note="Description of Artificial Sequence: Synthetic polynucleotide"
atggccctccctgtcaccgccctgctgcttccgctggctcttctgctccacgccgctcggcccgaaattgtgatgacccagtcacccgccactcttagcctttcacccggtgagcgcgcaaccctgtcttgcagagcctcccaagacatctcaaaataccttaattggtatcaacagaagcccggacaggctcctcgccttctgatctaccacaccagccggctccattctggaatccctgccaggttcagcggtagcggatctgggaccgactacaccctcactatcagctcactgcagccagaggacttcgctgtctatttctgtcagcaagggaacaccctgccctacacctttggacagggcaccaagctcgagattaaaggtggaggtggcagcggaggaggtgggtccggcggtggaggaagccaggtccaactccaagaaagcggaccgggtcttgtgaagccatcagaaactctttcactgacttgtactgtgagcggagtgtctctccccgattacggggtgtcttggatcagacagccaccggggaagggtctggaatggattggagtgatttggggctctgagactacttactacaattcatccctcaagtcacgcgtcaccatctcaaaggacaactctaagaatcaggtgtcactgaaactgtcatctgtgaccgcagccgacaccgccgtgtactattgcgctaagcattactattatggcgggagctacgcaatggattactggggacagggtactctggtcaccgtgtccagccaccaccatcatcaccatcaccat

SEQ ID NO: 68 - DNA, 813 bp, Artificial Sequence
  source: /note="Description of Artificial Sequence: Synthetic polynucleotide"
atggctctgcccgtgaccgcactcctcctgccactggctctgctgcttcacgccgctcgcccacaagtccagcttcaagaatcagggcctggtctggtgaagccatctgagactctgtccctcacttgcaccgtgagcggagtgtccctcccagactacggagtgagctggattagacagcctcccggaaagggactggagtggatcggagtgatttggggtagcgaaaccacttactataactcttccctgaagtcacgggtcaccatttcaaaggataactcaaagaatcaagtgagcctcaagctctcatcagtcaccgccgctgacaccgccgtgtattactgtgccaagcattactactatggagggtcctacgccatggactactggggccagggaactctggtcactgtgtcatctggtggaggaggtagcggaggaggcgggagcggtggaggtggctccgaaatcgtgatgacccagagccctgcaaccctgtccctttctcccggggaacgggctaccctttcttgtcgggcatcacaagatatctcaaaatacctcaattggtatcaacagaagccgggacaggcccctaggcttcttatctaccacacctctcgcctgcatagcgggattcccgcacgctttagcgggtctggaagcgggaccgactacactctgaccatctcatctctccagcccgaggacttcgccgtctacttctgccagcagggtaacaccctgccgtacaccttcggccagggcaccaagcttgagatcaaacatcaccaccatcatcaccatcac

SEQ ID NO: 69 - protein, 271 aa, Artificial Sequence
  source: /note="Description of Artificial Sequence: Synthetic polypeptide"
MALPVTALLLPLALLLHAARPEIVMTQSPATLSLSPGERATLSCRASQDISKYLNWYQQKPGQAPRLLIYHTSRLHSGIPARFSGSGSGTDYTLTISSLQPEDFAVYFCQQGNTLPYTFGQGTKLEIKGGGGSGGGGSGGGGSQVQLQESGPGLVKPSETLSLTCTVSGVSLPDYGVSWIRQPPGKGLEWIGVIWGSETTYYSSSLKSRVTISKDNSKNQVSLKLSSVTAADTAVYYCAKHYYYGGSYAMDYWGQGTLVTVSSHHHHHHHH

SEQ ID NO: 70 - protein, 271 aa, Artificial Sequence
  source: /note="Description of Artificial Sequence: Synthetic polypeptide"
MALPVTALLLPLALLLHAARPEIVMTQSPATLSLSPGERATLSCRASQDISKYLNWYQQKPGQAPRLLIYHTSRLHSGIPARFSGSGSGTDYTLTISSLQPEDFAVYFCQQGNTLPYTFGQGTKLEIKGGGGSGGGGSGGGGSQVQLQESGPGLVKPSETLSLTCTVSGVSLPDYGVSWIRQPPGKGLEWIGVIWGSETTYYQSSLKSRVTISKDNSKNQVSLKLSSVTAADTAVYYCAKHYYYGGSYAMDYWGQGTLVTVSSHHHHHHHH

SEQ ID NO: 71 - protein, 271 aa, Artificial Sequence
  source: /note="Description of Artificial Sequence: Synthetic polypeptide"
MALPVTALLLPLALLLHAARPQVQLQESGPGLVKPSETLSLTCTVSGVSLPDYGVSWIRQPPGKGLEWIGVIWGSETTYYSSSLKSRVTISKDNSKNQVSLKLSSVTAADTAVYYCAKHYYYGGSYAMDYWGQGTLVTVSSGGGGSGGGGSGGGGSEIVMTQSPATLSLSPGERATLSCRASQDISKYLNWYQQKPGQAPRLLIYHTSRLHSGIPARFSGSGSGTDYTLTISSLQPEDFAVYFCQQGNTLPYTFGQGTKLEIKHHHHHHHH

SEQ ID NO: 72 - protein, 271 aa, Artificial Sequence
  source: /note="Description of Artificial Sequence: Synthetic polypeptide"
MALPVTALLLPLALLLHAARPQVQLQESGPGLVKPSETLSLTCTVSGVSLPDYGVSWIRQPPGKGLEWIGVIWGSETTYYQSSLKSRVTISKDNSKNQVSLKLSSVTAADTAVYYCAKHYYYGGSYAMDYWGQGTLVTVSSGGGGSGGGGSGGGGSEIVMTQSPATLSLSPGERATLSCRASQDISKYLNWYQQKPGQAPRLLIYHTSRLHSGIPARFSGSGSGTDYTLTISSLQPEDFAVYFCQQGNTLPYTFGQGTKLEIKHHHHHHHH

SEQ ID NO: 73 - protein, 276 aa, Artificial Sequence
  source: /note="Description of Artificial Sequence: Synthetic polypeptide"
MALPVTALLLPLALLLHAARPEIVMTQSPATLSLSPGERATLSCRASQDISKYLNWYQQKPGQAPRLLIYHTSRLHSGIPARFSGSGSGTDYTLTISSLQPEDFAVYFCQQGNTLPYTFGQGTKLEIKGGGGSGGGGSGGGGSGGGGSQVQLQESGPGLVKPSETLSLTCTVSGVSLPDYGVSWIRQPPGKGLEWIGVIWGSETTYYSSSLKSRVTISKDNSKNQVSLKLSSVTAADTAVYYCAKHYYYGGSYAMDYWGQGTLVTVSSHHHHHHHH

SEQ ID NO: 74 - protein, 276 aa, Artificial Sequence
  source: /note="Description of Artificial Sequence: Synthetic polypeptide"
MALPVTALLLPLALLLHAARPEIVMTQSPATLSLSPGERATLSCRASQDISKYLNWYQQKPGQAPRLLIYHTSRLHSGIPARFSGSGSGTDYTLTISSLQPEDFAVYFCQQGNTLPYTFGQGTKLEIKGGGGSGGGGSGGGGSGGGGSQVQLQESGPGLVKPSETLSLTCTVSGVSLPDYGVSWIRQPPGKGLEWIGVIWGSETTYYQSSLKSRVTISKDNSKNQVSLKLSSVTAADTAVYYCAKHYYYGGSYAMDYWGQGTLVTVSSHHHHHHHH

SEQ ID NO: 75 - protein, 276 aa, Artificial Sequence
  source: /note="Description of Artificial Sequence: Synthetic polypeptide"
MALPVTALLLPLALLLHAARPQVQLQESGPGLVKPSETLSLTCTVSGVSLPDYGVSWIRQPPGKGLEWIGVIWGSETTYYSSSLKSRVTISKDNSKNQVSLKLSSVTAADTAVYYCAKHYYYGGSYAMDYWGQGTLVTVSSGGGGSGGGGSGGGGSGGGGSEIVMTQSPATLSLSPGERATLSCRASQDISKYLNWYQQKPGQAPRLLIYHTSRLHSGIPARFSGSGSGTDYTLTISSLQPEDFAVYFCQQGNTLPYTFGQGTKLEIKHHHHHHHH

SEQ ID NO: 76 - protein, 276 aa, Artificial Sequence
  source: /note="Description of Artificial Sequence: Synthetic polypeptide"
MALPVTALLLPLALLLHAARPQVQLQESGPGLVKPSETLSLTCTVSGVSLPDYGVSWIRQPPGKGLEWIGVIWGSETTYYQSSLKSRVTISKDNSKNQVSLKLSSVTAADTAVYYCAKHYYYGGSYAMDYWGQGTLVTVSSGGGGSGGGGSGGGGSGGGGSEIVMTQSPATLSLSPGERATLSCRASQDISKYLNWYQQKPGQAPRLLIYHTSRLHSGIPARFSGSGSGTDYTLTISSLQPEDFAVYFCQQGNTLPYTFGQGTKLEIKHHHHHHHH

SEQ ID NO: 77 - protein, 276 aa, Artificial Sequence
  source: /note="Description of Artificial Sequence: Synthetic polypeptide"
MALPVTALLLPLALLLHAARPEIVMTQSPATLSLSPGERATLSCRASQDISKYLNWYQQKPGQAPRLLIYHTSRLHSGIPARFSGSGSGTDYTLTISSLQPEDFAVYFCQQGNTLPYTFGQGTKLEIKGGGGSGGGGSGGGGSGGGGSQVQLQESGPGLVKPSETLSLTCTVSGVSLPDYGVSWIRQPPGKGLEWIGVIWGSETTYYNSSLKSRVTISKDNSKNQVSLKLSSVTAADTAVYYCAKHYYYGGSYAMDYWGQGTLVTVSSHHHHHHHH

SEQ ID NO: 78 - protein, 276 aa, Artificial Sequence
  source: /note="Description of Artificial Sequence: Synthetic polypeptide"
MALPVTALLLPLALLLHAARPQVQLQESGPGLVKPSETLSLTCTVSGVSLPDYGVSWIRQPPGKGLEWIGVIWGSETTYYNSSLKSRVTISKDNSKNQVSLKLSSVTAADTAVYYCAKHYYYGGSYAMDYWGQGTLVTVSSGGGGSGGGGSGGGGSGGGGSEIVMTQSPATLSLSPGERATLSCRASQDISKYLNWYQQKPGQAPRLLIYHTSRLHSGIPARFSGSGSGTDYTLTISSLQPEDFAVYFCQQGNTLPYTFGQGTKLEIKHHHHHHHH

SEQ ID NO: 79 - protein, 271 aa, Artificial Sequence
  source: /note="Description of Artificial Sequence: Synthetic polypeptide"
MALPVTALLLPLALLLHAARPEIVMTQSPATLSLSPGERATLSCRASQDISKYLNWYQQKPGQAPRLLIYHTSRLHSGIPARFSGSGSGTDYTLTISSLQPEDFAVYFCQQGNTLPYTFGQGTKLEIKGGGGSGGGGSGGGGSQVQLQESGPGLVKPSETLSLTCTVSGVSLPDYGVSWIRQPPGKGLEWIGVIWGSETTYYNSSLKSRVTISKDNSKNQVSLKLSSVTAADTAVYYCAKHYYYGGSYAMDYWGQGTLVTVSSHHHHHHHH

SEQ ID NO: 80 - protein, 271 aa, Artificial Sequence
  source: /note="Description of Artificial Sequence: Synthetic polypeptide"
MALPVTALLLPLALLLHAARPQVQLQESGPGLVKPSETLSLTCTVSGVSLPDYGVSWIRQPPGKGLEWIGVIWGSETTYYNSSLKSRVTISKDNSKNQVSLKLSSVTAADTAVYYCAKHYYYGGSYAMDYWGQGTLVTVSSGGGGSGGGGSGGGGSEIVMTQSPATLSLSPGERATLSCRASQDISKYLNWYQQKPGQAPRLLIYHTSRLHSGIPARFSGSGSGTDYTLTISSLQPEDFAVYFCQQGNTLPYTFGQGTKLEIKHHHHHHHH

SEQ ID NO: 81 - DNA, 1458 bp, Artificial Sequence
  source: /note="Description of Artificial Sequence: Synthetic polynucleotide"
atggccctccctgtcaccgccctgctgcttccgctggctcttctgctccacgccgctcggcccgaaattgtgatgacccagtcacccgccactcttagcctttcacccggtgagcgcgcaaccctgtcttgcagagcctcccaagacatctcaaaataccttaattggtatcaacagaagcccggacaggctcctcgccttctgatctaccacaccagccggctccattctggaatccctgccaggttcagcggtagcggatctgggaccgactacaccctcactatcagctcactgcagccagaggacttcgctgtctatttctgtcagcaagggaacaccctgccctacacctttggacagggcaccaagctcgagattaaaggtggaggtggcagcggaggaggtgggtccggcggtggaggaagccaggtccaactccaagaaagcggaccgggtcttgtgaagccatcagaaactctttcactgacttgtactgtgagcggagtgtctctccccgattacggggtgtcttggatcagacagccaccggggaagggtctggaatggattggagtgatttggggctctgagactacttactactcttcatccctcaagtcacgcgtcaccatctcaaaggacaactctaagaatcaggtgtcactgaaactgtcatctgtgaccgcagccgacaccgccgtgtactattgcgctaagcattactattatggcgggagctacgcaatggattactggggacagggtactctggtcaccgtgtccagcaccactaccccagcaccgaggccacccaccccggctcctaccatcgcctcccagcctctgtccctgcgtccggaggcatgtagacccgcagctggtggggccgtgcatacccggggtcttgacttcgcctgcgatatctacatttgggcccctctggctggtacttgcggggtcctgctgctttcactcgtgatcactctttactgtaagcgcggtcggaagaagctgctgtacatctttaagcaacccttcatgaggcctgtgcagactactcaagaggaggacggctgttcatgccggttcccagaggaggaggaaggcggctgcgaactgcgcgtgaaattcagccgcagcgcagatgctccagcctacaagcaggggcagaaccagctctacaacgaactcaatcttggtcggagagaggagtacgacgtgctggacaagcggagaggacgggacccagaaatgggcgggaagccgcgcagaaagaatccccaagagggcctgtacaacgagctccaaaaggataagatggcagaagcctatagcgagattggtatgaaaggggaacgcagaagaggcaaaggccacgacggactgtaccagggactcagcaccgccaccaaggacacctatgacgctcttcacatgcaggccctgccgcctcgg

SEQ ID NO: 82 - DNA, 1458 bp, Artificial Sequence
  source: /note="Description of Artificial Sequence: Synthetic polynucleotide"
atggccctccctgtcaccgccctgctgcttccgctggctcttctgctccacgccgctcggcccgaaattgtgatgacccagtcacccgccactcttagcctttcacccggtgagcgcgcaaccctgtcttgcagagcctcccaagacatctcaaaataccttaattggtatcaacagaagcccggacaggctcctcgccttctgatctaccacaccagccggctccattctggaatccctgccaggttcagcggtagcggatctgggaccgactacaccctcactatcagctcactgcagccagaggacttcgctgtctatttctgtcagcaagggaacaccctgccctacacctttggacagggcaccaagctcgagattaaaggtggaggtggcagcggaggaggtgggtccggcggtggaggaagccaggtccaactccaagaaagcggaccgggtcttgtgaagccatcagaaactctttcactgacttgtactgtgagcggagtgtctctccccgattacggggtgtcttggatcagacagccaccggggaagggtctggaatggattggagtgatttggggctctgagactacttactaccaatcatccctcaagtcacgcgtcaccatctcaaaggacaactctaagaatcaggtgtcactgaaactgtcatctgtgaccgcagccgacaccgccgtgtactattgcgctaagcattactattatggcgggagctacgcaatggattactggggacagggtactctggtcaccgtgtccagcaccactaccccagcaccgaggccacccaccccggctcctaccatcgcctcccagcctctgtccctgcgtccggaggcatgtagacccgcagctggtggggccgtgcatacccggggtcttgacttcgcctgcgatatctacatttgggcccctctggctggtacttgcggggtcctgctgctttcactcgtgatcactctttactgtaagcgcggtcggaagaagctgctgtacatctttaagcaacccttcatgaggcctgtgcagactactcaagaggaggacggctgttcatgccggttcccagaggaggaggaaggcggctgcgaactgcgcgtgaaattcagccgcagcgcagatgctccagcctacaagcaggggcagaaccagctctacaacgaactcaatcttggtcggagagaggagtacgacgtgctggacaagcggagaggacgggacccagaaatgggcgggaagccgcgcagaaagaatccccaagagggcctgtacaacgagctccaaaaggataagatggcagaagcctatagcgagattggtatgaaaggggaacgcagaagaggcaaaggccacgacggactgtaccagggactcagcaccgccaccaaggacacctatgacgctcttcacatgcaggccctgccgcctcgg

SEQ ID NO: 83 - DNA, 1458 bp, Artificial Sequence
  source: /note="Description of Artificial Sequence: Synthetic polynucleotide"
atggctctgcccgtgaccgcactcctcctgccactggctctgctgcttcacgccgctcgcccacaagtccagcttcaagaatcagggcctggtctggtgaagccatctgagactctgtccctcacttgcaccgtgagcggagtgtccctcccagactacggagtgagctggattagacagcctcccggaaagggactggagtggatcggagtgatttggggtagcgaaaccacttactattcatcttccctgaagtcacgggtcaccatttcaaaggataactcaaagaatcaagtgagcctcaagctctcatcagtcaccgccgctgacaccgccgtgtattactgtgccaagcattactactatggagggtcctacgccatggactactggggccagggaactctggtcactgtgtcatctggtggaggaggtagcggaggaggcgggagcggtggaggtggctccgaaatcgtgatgacccagagccctgcaaccctgtccctttctcccggggaacgggctaccctttcttgtcgggcatcacaagatatctcaaaatacctcaattggtatcaacagaagccgggacaggcccctaggcttcttatctaccacacctctcgcctgcatagcgggattcccgcacgctttagcgggtctggaagcgggaccgactacactctgaccatctcatctctccagcccgaggacttcgccgtctacttctgccagcagggtaacaccctgccgtacaccttcggccagggcaccaagcttgagatcaaaaccactactcccgctccaaggccacccacccctgccccgaccatcgcctctcagccgctttccctgcgtccggaggcatgtagacccgcagctggtggggccgtgcatacccggggtcttgacttcgcctgcgatatctacatttgggcccctctggctggtacttgcggggtcctgctgctttcactcgtgatcactctttactgtaagcgcggtcggaagaagctgctgtacatctttaagcaacccttcatgaggcctgtgcagactactcaagaggaggacggctgttcatgccggttcccagaggaggaggaaggcggctgcgaactgcgcgtgaaattcagccgcagcgcagatgctccagcctacaagcaggggcagaaccagctctacaacgaactcaatcttggtcggagagaggagtacgacgtgctggacaagcggagaggacgggacccagaaatgggcgggaagccgcgcagaaagaatccccaagagggcctgtacaacgagctccaaaaggataagatggcagaagcctatagcgagattggtatgaaaggggaacgcagaagaggcaaaggccacgacggactgtaccagggactcagcaccgccaccaaggacacctatgacgctcttcacatgcaggccctgccgcctcgg

SEQ ID NO: 84 - DNA, 1458 bp, Artificial Sequence
  source: /note="Description of Artificial Sequence: Synthetic polynucleotide"
atggctctgcccgtgaccgcactcctcctgccactggctctgctgcttcacgccgctcgcccacaagtccagcttcaagaatcagggcctggtctggtgaagccatctgagactctgtccctcacttgcaccgtgagcggagtgtccctcccagactacggagtgagctggattagacagcctcccggaaagggactggagtggatcggagtgatttggggtagcgaaaccacttactatcaatcttccctgaagtcacgggtcaccatttcaaaggataactcaaagaatcaagtgagcctcaagctctcatcagtcaccgccgctgacaccgccgtgtattactgtgccaagcattactactatggagggtcctacgccatggactactggggccagggaactctggtcactgtgtcatctggtggaggaggtagcggaggaggcgggagcggtggaggtggctccgaaatcgtgatgacccagagccctgcaaccctgtccctttctcccggggaacgggctaccctttcttgtcgggcatcacaagatatctcaaaatacctcaattggtatcaacagaagccgggacaggcccctaggcttcttatctaccacacctctcgcctgcatagcgggattcccgcacgctttagcgggtctggaagcgggaccgactacactctgaccatctcatctctccagcccgaggacttcgccgtctacttctgccagcagggtaacaccctgccgtacaccttcggccagggcaccaagcttgagatcaaaaccactactcccgctccaaggccacccacccctgccccgaccatcgcctctcagccgctttccctgcgtccggaggcatgtagacccgcagctggtggggccgtgcatacccggggtcttgacttcgcctgcgatatctacatttgggcccctctggctggtacttgcggggtcctgctgctttcactcgtgatcactctttactgtaagcgcggtcggaagaagctgctgtacatctttaagcaacccttcatgaggcctgtgcagactactcaagaggaggacggctgttcatgccggttcccagaggaggaggaaggcggctgcgaactgcgcgtgaaattcagccgcagcgcagatgctccagcctacaagcaggggcagaaccagctctacaacgaactcaatcttggtcggagagaggagtacgacgtgctggacaagcggagaggacgggacccagaaatgggcgggaagccgcgcagaaagaatccccaagagggcctgtacaacgagctccaaaaggataagatggcagaagcctatagcgagattggtatgaaaggggaacgcagaagaggcaaaggccacgacggactgtaccagggactcagcaccgccaccaaggacacctatgacgctcttcacatgcaggccctgccgcctcgg

SEQ ID NO: 85 - DNA, 1473 bp, Artificial Sequence
  source: /note="Description of Artificial Sequence: Synthetic polynucleotide"
atggccctccctgtcaccgccctgctgcttccgctggctcttctgctccacgccgctcggcccgaaattgtgatgacccagtcacccgccactcttagcctttcacccggtgagcgcgcaaccctgtcttgcagagcctcccaagacatctcaaaataccttaattggtatcaacagaagcccggacaggctcctcgccttctgatctaccacaccagccggctccattctggaatccctgccaggttcagcggtagcggatctgggaccgactacaccctcactatcagctcactgcagccagaggacttcgctgtctatttctgtcagcaagggaacaccctgccctacacctttggacagggcaccaagctcgagattaaaggtggaggtggcagcggaggaggtgggtccggcggtggaggaagcggcggaggcgggagccaggtccaactccaagaaagcggaccgggtcttgtgaagccatcagaaactctttcactgacttgtactgtgagcggagtgtctctccccgattacggggtgtcttggatcagacagccaccggggaagggtctggaatggattggagtgatttggggctctgagactacttactactcttcatccctcaagtcacgcgtcaccatctcaaaggacaactctaagaatcaggtgtcactgaaactgtcatctgtgaccgcagccgacaccgccgtgtactattgcgctaagcattactattatggcgggagctacgcaatggattactggggacagggtactctggtcaccgtgtccagcaccactaccccagcaccgaggccacccaccccggctcctaccatcgcctcccagcctctgtccctgcgtccggaggcatgtagacccgcagctggtggggccgtgcatacccggggtcttgacttcgcctgcgatatctacatttgggcccctctggctggtacttgcggggtcctgctgctttcactcgtgatcactctttactgtaagcgcggtcggaagaagctgctgtacatctttaagcaacccttcatgaggcctgtgcagactactcaagaggaggacggctgttcatgccggttcccagaggaggaggaaggcggctgcgaactgcgcgtgaaattcagccgcagcgcagatgctccagcctacaagcaggggcagaaccagctctacaacgaactcaatcttggtcggagagaggagtacgacgtgctggacaagcggagaggacgggacccagaaatgggcgggaagccgcgcagaaagaatccccaagagggcctgtacaacgagctccaaaaggataagatggcagaagcctatagcgagattggtatgaaaggggaacgcagaagaggcaaaggccacgacggactgtaccagggactcagcaccgccaccaaggacacctatgacgctcttcacatgcaggccctgccgcctcgg

SEQ ID NO: 86 - DNA, 1473 bp, Artificial Sequence
  source: /note="Description of Artificial Sequence: Synthetic polynucleotide"
atggccctccctgtcaccgccctgctgcttccgctggctcttctgctccacgccgctcggcccgaaattgtgatgacccagtcacccgccactcttagcctttcacccggtgagcgcgcaaccctgtcttgcagagcctcccaagacatctcaaaataccttaattggtatcaacagaagcccggacaggctcctcgccttctgatctaccacaccagccggctccattctggaatccctgccaggttcagcggtagcggatctgggaccgactacaccctcactatcagctcactgcagccagaggacttcgctgtctatttctgtcagcaagggaacaccctgccctacacctttggacagggcaccaagctcgagattaaaggtggaggtggcagcggaggaggtgggtccggcggtggaggaagcggaggcggagggagccaggtccaactccaagaaagcggaccgggtcttgtgaagccatcagaaactctttcactgacttgtactgtgagcggagtgtctctccccgattacggggtgtcttggatcagacagccaccggggaagggtctggaatggattggagtgatttggggctctgagactacttactaccaatcatccctcaagtcacgcgtcaccatctcaaaggacaactctaagaatcaggtgtcactgaaactgtcatctgtgaccgcagccgacaccgccgtgtactattgcgctaagcattactattatggcgggagctacgcaatggattactggggacagggtactctggtcaccgtgtccagcaccactaccccagcaccgaggccacccaccccggctcctaccatcgcctcccagcctctgtccctgcgtccggaggcatgtagacccgcagctggtggggccgtgcatacccggggtcttgacttcgcctgcgatatctacatttgggcccctctggctggtacttgcggggtcctgctgctttcactcgtgatcactctttactgtaagcgcggtcggaagaagctgctgtacatctttaagcaacccttcatgaggcctgtgcagactactcaagaggaggacggctgttcatgccggttcccagaggaggaggaaggcggctgcgaactgcgcgtgaaattcagccgcagcgcagatgctccagcctacaagcaggggcagaaccagctctacaacgaactcaatcttggtcggagagaggagtacgacgtgctggacaagcggagaggacgggacccagaaatgggcgggaagccgcgcagaaagaatccccaagagggcctgtacaacgagctccaaaaggataagatggcagaagcctatagcgagattggtatgaaaggggaacgcagaagaggcaaaggccacgacggactgtaccagggactcagcaccgccaccaaggacacctatgacgctcttcacatgcaggccctgccgcctcgg

SEQ ID NO: 87 - DNA, 1473 bp, Artificial Sequence
  source: /note="Description of Artificial Sequence: Synthetic polynucleotide"
atggctctgcccgtgaccgcactcctcctgccactggctctgctgcttcacgccgctcgcccacaagtccagcttcaagaatcagggcctggtctggtgaagccatctgagactctgtccctcacttgcaccgtgagcggagtgtccctcccagactacggagtgagctggattagacagcctcccggaaagggactggagtggatcggagtgatttggggtagcgaaaccacttactattcatcttccctgaagtcacgggtcaccatttcaaaggataactcaaagaatcaagtgagcctcaagctctcatcagtcaccgccgctgacaccgccgtgtattactgtgccaagcattactactatggagggtcctacgccatggactactggggccagggaactctggtcactgtgtcatctggtggaggaggtagcggaggaggcgggagcggtggaggtggctccggaggtggcggaagcgaaatcgtgatgacccagagccctgcaaccctgtccctttctcccggggaacgggctaccctttcttgtcgggcatcacaagatatctcaaaatacctcaattggtatcaacagaagccgggacaggcccctaggcttcttatctaccacacctctcgcctgcatagcgggattcccgcacgctttagcgggtctggaagcgggaccgactacactctgaccatctcatctctccagcccgaggacttcgccgtctacttctgccagcagggtaacaccctgccgtacaccttcggccagggcaccaagcttgagatcaaaaccactactcccgctccaaggccacccacccctgccccgaccatcgcctctcagccgctttccctgcgtccggaggcatgtagacccgcagctggtggggccgtgcatacccggggtcttgacttcgcctgcgatatctacatttgggcccctctggctggtacttgcggggtcctgctgctttcactcgtgatcactctttactgtaagcgcggtcggaagaagctgctgtacatctttaagcaacccttcatgaggcctgtgcagactactcaagaggaggacggctgttcatgccggttcccagaggaggaggaaggcggctgcgaactgcgcgtgaaattcagccgcagcgcagatgctccagcctacaagcaggggcagaaccagctctacaacgaactcaatcttggtcggagagaggagtacgacgtgctggacaagcggagaggacgggacccagaaatgggcgggaagccgcgcagaaagaatccccaagagggcctgtacaacgagctccaaaaggataagatggcagaagcctatagcgagattggtatgaaaggggaacgcagaagaggcaaaggccacgacggactgtaccagggactcagcaccgccaccaaggacacctatgacgctcttcacatgcaggccctgccgcctcgg

SEQ ID NO: 88 - DNA, 1473 bp, Artificial Sequence
  source: /note="Description of Artificial Sequence: Synthetic polynucleotide"
atggctctgcccgtgaccgcactcctcctgccactggctctgctgcttcacgccgctcgcccacaagtccagcttcaagaatcagggcctggtctggtgaagccatctgagactctgtccctcacttgcaccgtgagcggagtgtccctcccagactacggagtgagctggattagacagcctcccggaaagggactggagtggatcggagtgatttggggtagcgaaaccacttactatcaatcttccctgaagtcacgggtcaccatttcaaaggataactcaaagaatcaagtgagcctcaagctctcatcagtcaccgccgctgacaccgccgtgtattactgtgccaagcattactactatggagggtcctacgccatggactactggggccagggaactctggtcactgtgtcatctggtggaggaggtagcggaggaggcgggagcggtggaggtggctccggaggcggtgggtcagaaatcgtgatgacccagagccctgcaaccctgtccctttctcccggggaacgggctaccctttcttgtcgggcatcacaagatatctcaaaatacctcaattggtatcaacagaagccgggacaggcccctaggcttcttatctaccacacctctcgcctgcatagcgggattcccgcacgctttagcgggtctggaagcgggaccgactacactctgaccatctcatctctccagcccgaggacttcgccgtctacttctgccagcagggtaacaccctgccgtacaccttcggccagggcaccaagcttgagatcaaaaccactactcccgctccaaggccacccacccctgccccgaccatcgcctctcagccgctttccctgcgtccggaggcatgtagacccgcagctggtggggccgtgcatacccggggtcttgacttcgcctgcgatatctacatttgggcccctctggctggtacttgcggggtcctgctgctttcactcgtgatcactctttactgtaagcgcggtcggaagaagctgctgtacatctttaagcaacccttcatgaggcctgtgcagactactcaagaggaggacggctgttcatgccggttcccagaggaggaggaaggcggctgcgaactgcgcgtgaaattcagccgcagcgcagatgctccagcctacaagcaggggcagaaccagctctacaacgaactcaatcttggtcggagagaggagtacgacgtgctggacaagcggagaggacgggacccagaaatgggcgggaagccgcgcagaaagaatccccaagagggcctgtacaacgagctccaaaaggataagatggcagaagcctatagcgagattggtatgaaaggggaacgcagaagaggcaaaggccacgacggactgtaccagggactcagcaccgccaccaaggacacctatgacgctcttcacatgcaggccctgccgcctcgg

SEQ ID NO: 89 - DNA, 1473 bp, Artificial Sequence
  source: /note="Description of Artificial Sequence: Synthetic polynucleotide"
atggccctccctgtcaccgccctgctgcttccgctggctcttctgctccacgccgctcggcccgaaattgtgatgacccagtcacccgccactcttagcctttcacccggtgagcgcgcaaccctgtcttgcagagcctcccaagacatctcaaaataccttaattggtatcaacagaagcccggacaggctcctcgccttctgatctaccacaccagccggctccattctggaatccctgccaggttcagcggtagcggatctgggaccgactacaccctcactatcagctcactgcagccagaggacttcgctgtctatttctgtcagcaagggaacaccctgccctacacctttggacagggcaccaagctcgagattaaaggtggaggtggcagcggaggaggtgggtccggcggtggaggaagcggaggcggtgggagccaggtccaactccaagaaagcggaccgggtcttgtgaagccatcagaaactctttcactgacttgtactgtgagcggagtgtctctccccgattacggggtgtcttggatcagacagccaccggggaagggtctggaatggattggagtgatttggggctctgagactacttactacaactcatccctcaagtcacgcgtcaccatctcaaaggacaactctaagaatcaggtgtcactgaaactgtcatctgtgaccgcagccgacaccgccgtgtactattgcgctaagcattactattatggcgggagctacgcaatggattactggggacagggtactctggtcaccgtgtccagcaccactaccccagcaccgaggccacccaccccggctcctaccatcgcctcccagcctctgtccctgcgtccggaggcatgtagacccgcagctggtggggccgtgcatacccggggtcttgacttcgcctgcgatatctacatttgggcccctctggctggtacttgcggggtcctgctgctttcactcgtgatcactctttactgtaagcgcggtcggaagaagctgctgtacatctttaagcaacccttcatgaggcctgtgcagactactcaagaggaggacggctgttcatgccggttcccagaggaggaggaaggcggctgcgaactgcgcgtgaaattcagccgcagcgcagatgctccagcctacaagcaggggcagaaccagctctacaacgaactcaatcttggtcggagagaggagtacgacgtgctggacaagcggagaggacgggacccagaaatgggcgggaagccgcgcagaaagaatccccaagagggcctgtacaacgagctccaaaaggataagatggcagaagcctatagcgagattggtatgaaaggggaacgcagaagaggcaaaggccacgacggactgtaccagggactcagcaccgccaccaaggacacctatgacgctcttcacatgcaggccctgccgcctcgg

SEQ ID NO: 90 - DNA, 1473 bp, Artificial Sequence; identical to SEQ ID NO: 89
  source: /note="Description of Artificial Sequence: Synthetic polynucleotide"

SEQ ID NO: 91 - DNA, 1473 bp, Artificial Sequence
  source: /note="Description of Artificial Sequence: Synthetic polynucleotide"
atggctctgcccgtgaccgcactcctcctgccactggctctgctgcttcacgccgctcgcccacaagtccagcttcaagaatcagggcctggtctggtgaagccatctgagactctgtccctcacttgcaccgtgagcggagtgtccctcccagactacggagtgagctggattagacagcctcccggaaagggactggagtggatcggagtgatttggggtagcgaaaccacttactataactcttccctgaagtcacgggtcaccatttcaaaggataactcaaagaatcaagtgagcctcaagctctcatcagtcaccgccgctgacaccgccgtgtattactgtgccaagcattactactatggagggtcctacgccatggactactggggccagggaactctggtcactgtgtcatctggtggaggaggtagcggaggaggcgggagcggtggaggtggctccggaggtggcggaagcgaaatcgtgatgacccagagccctgcaaccctgtccctttctcccggggaacgggctaccctttcttgtcgggcatcacaagatatctcaaaatacctcaattggtatcaacagaagccgggacaggcccctaggcttcttatctaccacacctctcgcctgcatagcgggattcccgcacgctttagcgggtctggaagcgggaccgactacactctgaccatctcatctctccagcccgaggacttcgccgtctacttctgccagcagggtaacaccctgccgtacaccttcggccagggcaccaagcttgagatcaaaaccactactcccgctccaaggccacccacccctgccccgaccatcgcctctcagccgctttccctgcgtccggaggcatgtagacccgcagctggtggggccgtgcatacccggggtcttgacttcgcctgcgatatctacatttgggcccctctggctggtacttgcggggtcctgctgctttcactcgtgatcactctttactgtaagcgcggtcggaagaagctgctgtacatctttaagcaacccttcatgaggcctgtgcagactactcaagaggaggacggctgttcatgccggttcccagaggaggaggaaggcggctgcgaactgcgcgtgaaattcagccgcagcgcagatgctccagcctacaagcaggggcagaaccagctctacaacgaactcaatcttggtcggagagaggagtacgacgtgctggacaagcggagaggacgggacccagaaatgggcgggaagccgcgcagaaagaatccccaagagggcctgtacaacgagctccaaaaggataagatggcagaagcctatagcgagattggtatgaaaggggaacgcagaagaggcaaaggccacgacggactgtaccagggactcagcaccgccaccaaggacacctatgacgctcttcacatgcaggccctgccgcctcgg

SEQ ID NO: 92 - DNA, 1458 bp, Artificial Sequence
  source: /note="Description of Artificial Sequence: Synthetic polynucleotide"
atggccctccctgtcaccgccctgctgcttccgctggctcttctgctccacgccgctcggcccgaaattgtgatgacccagtcacccgccactcttagcctttcacccggtgagcgcgcaaccctgtcttgcagagcctcccaagacatctcaaaataccttaattggtatcaacagaagcccggacaggctcctcgccttctgatctaccacaccagccggctccattctggaatccctgccaggttcagcggtagcggatctgggaccgactacaccctcactatcagctcactgcagccagaggacttcgctgtctatttctgtcagcaagggaacaccctgccctacacctttggacagggcaccaagctcgagattaaaggtggaggtggcagcggaggaggtgggtccggcggtggaggaagccaggtccaactccaagaaagcggaccgggtcttgtgaagccatcagaaactctttcactgacttgtactgtgagcggagtgtctctccccgattacggggtgtcttggatcagacagccaccggggaagggtctggaatggattggagtgatttggggctctgagactacttactacaactcatccctcaagtcacgcgtcaccatctcaaaggacaactctaagaatcaggtgtcactgaaactgtcatctgtgaccgcagccgacaccgccgtgtactattgcgctaagcattactattatggcgggagctacgcaatggattactggggacagggtactctggtcaccgtgtccagcaccactaccccagcaccgaggccacccaccccggctcctaccatcgcctcccagcctctgtccctgcgtccggaggcatgtagacccgcagctggtggggccgtgcatacccggggtcttgacttcgcctgcgatatctacatttgggcccctctggctggtacttgcggggtcctgctgctttcactcgtgatcactctttactgtaagcgcggtcggaagaagctgctgtacatctttaagcaacccttcatgaggcctgtgcagactactcaagaggaggacggctgttcatgccggttcccagaggaggaggaaggcggctgcgaactgcgcgtgaaattcagccgcagcgcagatgctccagcctacaagcaggggcagaaccagctctacaacgaactcaatcttggtcggagagaggagtacgacgtgctggacaagcggagaggacgggacccagaaatgggcgggaagccgcgcagaaagaatccccaagagggcctgtacaacgagctccaaaaggataagatggcagaagcctatagcgagattggtatgaaaggggaacgcagaagaggcaaaggccacgacggactgtaccagggactcagcaccgccaccaaggacacctatgacgctcttcacatgcaggccctgccgcctcgg

SEQ ID NO: 93 - protein, 486 aa, Artificial Sequence
  source: /note="Description of Artificial Sequence: Synthetic polypeptide"
MALPVTALLLPLALLLHAARPEIVMTQSPATLSLSPGERATLSCRASQDISKYLNWYQQKPGQAPRLLIYHTSRLHSGIPARFSGSGSGTDYTLTISSLQPEDFAVYFCQQGNTLPYTFGQGTKLEIKGGGGSGGGGSGGGGSQVQLQESGPGLVKPSETLSLTCTVSGVSLPDYGVSWIRQPPGKGLEWIGVIWGSETTYYSSSLKSRVTISKDNSKNQVSLKLSSVTAADTAVYYCAKHYYYGGSYAMDYWGQGTLVTVSSTTTPAPRPPTPAPTIASQPLSLRPEACRPAAGGAVHTRGLDFACDIYIWAPLAGTCGVLLLSLVITLYCKRGRKKLLYIFKQPFMRPVQTTQEEDGCSCRFPEEEEGGCELRVKFSRSADAPAYKQGQNQLYNELNLGRREEYDVLDKRRGRDPEMGGKPRRKNPQEGLYNELQKDKMAEAYSEIGMKGERRRGKGHDGLYQGLSTATKDTYDALHMQALPPR

SEQ ID NO: 94 - protein, 486 aa, Artificial Sequence
  source: /note="Description of Artificial Sequence: Synthetic polypeptide"
MALPVTALLLPLALLLHAARPEIVMTQSPATLSLSPGERATLSCRASQDISKYLNWYQQKPGQAPRLLIYHTSRLHSGIPARFSGSGSGTDYTLTISSLQPEDFAVYFCQQGNTLPYTFGQGTKLEIKGGGGSGGGGSGGGGSQVQLQESGPGLVKPSETLSLTCTVSGVSLPDYGVSWIRQPPGKGLEWIGVIWGSETTYYQSSLKSRVTISKDNSKNQVSLKLSSVTAADTAVYYCAKHYYYGGSYAMDYWGQGTLVTVSSTTTPAPRPPTPAPTIASQPLSLRPEACRPAAGGAVHTRGLDFACDIYIWAPLAGTCGVLLLSLVITLYCKRGRKKLLYIFKQPFMRPVQTTQEEDGCSCRFPEEEEGGCELRVKFSRSADAPAYKQGQNQLYNELNLGRREEYDVLDKRRGRDPEMGGKPRRKNPQEGLYNELQKDKMAEAYSEIGMKGERRRGKGHDGLYQGLSTATKDTYDALHMQALPPR

SEQ ID NO: 95 - protein, 486 aa, Artificial Sequence
  source: /note="Description of Artificial Sequence: Synthetic polypeptide"
MALPVTALLLPLALLLHAARPQVQLQESGPGLVKPSETLSLTCTVSGVSLPDYGVSWIRQPPGKGLEWIGVIWGSETTYYSSSLKSRVTISKDNSKNQVSLKLSSVTAADTAVYYCAKHYYYGGSYAMDYWGQGTLVTVSSGGGGSGGGGSGGGGSEIVMTQSPATLSLSPGERATLSCRASQDISKYLNWYQQKPGQAPRLLIYHTSRLHSGIPARFSGSGSGTDYTLTISSLQPEDFAVYFCQQGNTLPYTFGQGTKLEIKTTTPAPRPPTPAPTIASQPLSLRPEACRPAAGGAVHTRGLDFACDIYIWAPLAGTCGVLLLSLVITLYCKRGRKKLLYIFKQPFMRPVQTTQEEDGCSCRFPEEEEGGCELRVKFSRSADAPAYKQGQNQLYNELNLGRREEYDVLDKRRGRDPEMGGKPRRKNPQEGLYNELQKDKMAEAYSEIGMKGERRRGKGHDGLYQGLSTATKDTYDALHMQALPPR

SEQ ID NO: 96 - protein, 486 aa, Artificial Sequence
  source: /note="Description of Artificial Sequence: Synthetic polypeptide"
MALPVTALLLPLALLLHAARPQVQLQESGPGLVKPSETLSLTCTVSGVSLPDYGVSWIRQPPGKGLEWIGVIWGSETTYYQSSLKSRVTISKDNSKNQVSLKLSSVTAADTAVYYCAKHYYYGGSYAMDYWGQGTLVTVSSGGGGSGGGGSGGGGSEIVMTQSPATLSLSPGERATLSCRASQDISKYLNWYQQKPGQAPRLLIYHTSRLHSGIPARFSGSGSGTDYTLTISSLQPEDFAVYFCQQGNTLPYTFGQGTKLEIKTTTPAPRPPTPAPTIASQPLSLRPEACRPAAGGAVHTRGLDFACDIYIWAPLAGTCGVLLLSLVITLYCKRGRKKLLYIFKQPFMRPVQTTQEEDGCSCRFPEEEEGGCELRVKFSRSADAPAYKQGQNQLYNELNLGRREEYDVLDKRRGRDPEMGGKPRRKNPQEGLYNELQKDKMAEAYSEIGMKGERRRGKGHDGLYQGLSTATKDTYDALHMQALPPR

SEQ ID NO: 97 - protein, 491 aa, Artificial Sequence
  source: /note="Description of Artificial Sequence: Synthetic polypeptide"
MALPVTALLLPLALLLHAARPEIVMTQSPATLSLSPGERATLSCRASQDISKYLNWYQQKPGQAPRLLIYHTSRLHSGIPARFSGSGSGTDYTLTISSLQPEDFAVYFCQQGNTLPYTFGQGTKLEIKGGGGSGGGGSGGGGSGGGGSQVQLQESGPGLVKPSETLSLTCTVSGVSLPDYGVSWIRQPPGKGLEWIGVIWGSETTYYSSSLKSRVTISKDNSKNQVSLKLSSVTAADTAVYYCAKHYYYGGSYAMDYWGQGTLVTVSSTTTPAPRPPTPAPTIASQPLSLRPEACRPAAGGAVHTRGLDFACDIYIWAPLAGTCGVLLLSLVITLYCKRGRKKLLYIFKQPFMRPVQTTQEEDGCSCRFPEEEEGGCELRVKFSRSADAPAYKQGQNQLYNELNLGRREEYDVLDKRRGRDPEMGGKPRRKNPQEGLYNELQKDKMAEAYSEIGMKGERRRGKGHDGLYQGLSTATKDTYDALHMQALPPR

SEQ ID NO: 98 - protein, 491 aa, Artificial Sequence
  source: /note="Description of Artificial Sequence: Synthetic polypeptide"
MALPVTALLLPLALLLHAARPEIVMTQSPATLSLSPGERATLSCRASQDISKYLNWYQQKPGQAPRLLIYHTSRLHSGIPARFSGSGSGTDYTLTISSLQPEDFAVYFCQQGNTLPYTFGQGTKLEIKGGGGSGGGGSGGGGSGGGGSQVQLQESGPGLVKPSETLSLTCTVSGVSLPDYGVSWIRQPPGKGLEWIGVIWGSETTYYQSSLKSRVTISKDNSKNQVSLKLSSVTAADTAVYYCAKHYYYGGSYAMDYWGQGTLVTVSSTTTPAPRPPTPAPTIASQPLSLRPEACRPAAGGAVHTRGLDFACDIYIWAPLAGTCGVLLLSLVITLYCKRGRKKLLYIFKQPFMRPVQTTQEEDGCSCRFPEEEEGGCELRVKFSRSADAPAYKQGQNQLYNELNLGRREEYDVLDKRRGRDPEMGGKPRRKNPQEGLYNELQKDKMAEAYSEIGMKGERRRGKGHDGLYQGLSTATKDTYDALHMQALPPR

SEQ ID NO: 99 - protein, 491 aa, Artificial Sequence
  source: /note="Description of Artificial Sequence: Synthetic polypeptide"
MALPVTALLLPLALLLHAARPQVQLQESGPGLVKPSETLSLTCTVSGVSLPDYGVSWIRQPPGKGLEWIGVIWGSETTYYSSSLKSRVTISKDNSKNQVSLKLSSVTAADTAVYYCAKHYYYGGSYAMDYWGQGTLVTVSSGGGGSGGGGSGGGGSGGGGSEIVMTQSPATLSLSPGERATLSCRASQDISKYLNWYQQKPGQAPRLLIYHTSRLHSGIPARFSGSGSGTDYTLTISSLQPEDFAVYFCQQGNTLPYTFGQGTKLEIKTTTPAPRPPTPAPTIASQPLSLRPEACRPAAGGAVHTRGLDFACDIYIWAPLAGTCGVLLLSLVITLYCKRGRKKLLYIFKQPFMRPVQTTQEEDGCSCRFPEEEEGGCELRVKFSRSADAPAYKQGQNQLYNELNLGRREEYDVLDKRRGRDPEMGGKPRRKNPQEGLYNELQKDKMAEAYSEIGMKGERRRGKGHDGLYQGLSTATKDTYDALHMQALPPR

SEQ ID NO: 100 - protein, 491 aa, Artificial Sequence
  source: /note="Description of Artificial Sequence: Synthetic polypeptide"
MALPVTALLLPLALLLHAARPQVQLQESGPGLVKPSETLSLTCTVSGVSLPDYGVSWIRQPPGKGLEWIGVIWGSETTYYQSSLKSRVTISKDNSKNQVSLKLSSVTAADTAVYYCAKHYYYGGSYAMDYWGQGTLVTVSSGGGGSGGGGSGGGGSGGGGSEIVMTQSPATLSLSPGERATLSCRASQDISKYLNWYQQKPGQAPRLLIYHTSRLHSGIPARFSGSGSGTDYTLTISSLQPEDFAVYFCQQGNTLPYTFGQGTKLEIKTTTPAPRPPTPAPTIASQPLSLRPEACRPAAGGAVHTRGLDFACDIYIWAPLAGTCGVLLLSLVITLYCKRGRKKLLYIFKQPFMRPVQTTQEEDGCSCRFPEEEEGGCELRVKFSRSADAPAYKQGQNQLYNELNLGRREEYDVLDKRRGRDPEMGGKPRRKNPQEGLYNELQKDKMAEAYSEIGMKGERRRGKGHDGLYQGLSTATKDTYDALHMQALPPR

SEQ ID NO: 101 - protein, 491 aa, Artificial Sequence
  source: /note="Description of Artificial Sequence: Synthetic polypeptide"
MALPVTALLLPLALLLHAARPEIVMTQSPATLSLSPGERATLSCRASQDISKYLNWYQQKPGQAPRLLIYHTSRLHSGIPARFSGSGSGTDYTLTISSLQPEDFAVYFCQQGNTLPYTFGQGTKLEIKGGGGSGGGGSGGGGSGGGGSQVQLQESGPGLVKPSETLSLTCTVSGVSLPDYGVSWIRQPPGKGLEWIGVIWGSETTYYNSSLKSRVTISKDNSKNQVSLKLSSVTAADTAVYYCAKHYYYGGSYAMDYWGQGTLVTVSSTTTPAPRPPTPAPTIASQPLSLRPEACRPAAGGAVHTRGLDFACDIYIWAPLAGTCGVLLLSLVITLYCKRGRKKLLYIFKQPFMRPVQTTQEEDGCSCRFPEEEEGGCELRVKFSRSADAPAYKQGQNQLYNELNLGRREEYDVLDKRRGRDPEMGGKPRRKNPQEGLYNELQKDKMAEAYSEIGMKGERRRGKGHDGLYQGLSTATKDTYDALHMQALPPR

SEQ ID NO: 102 - protein, 491 aa, Artificial Sequence; identical to SEQ ID NO: 101
  source: /note="Description of Artificial Sequence: Synthetic polypeptide"

SEQ ID NO: 103 - protein, 491 aa, Artificial Sequence
  source: /note="Description of Artificial Sequence: Synthetic polypeptide"
MALPVTALLLPLALLLHAARPQVQLQESGPGLVKPSETLSLTCTVSGVSLPDYGVSWIRQPPGKGLEWIGVIWGSETTYYNSSLKSRVTISKDNSKNQVSLKLSSVTAADTAVYYCAKHYYYGGSYAMDYWGQGTLVTVSSGGGGSGGGGSGGGGSGGGGSEIVMTQSPATLSLSPGERATLSCRASQDISKYLNWYQQKPGQAPRLLIYHTSRLHSGIPARFSGSGSGTDYTLTISSLQPEDFAVYFCQQGNTLPYTFGQGTKLEIKTTTPAPRPPTPAPTIASQPLSLRPEACRPAAGGAVHTRGLDFACDIYIWAPLAGTCGVLLLSLVITLYCKRGRKKLLYIFKQPFMRPVQTTQEEDGCSCRFPEEEEGGCELRVKFSRSADAPAYKQGQNQLYNELNLGRREEYDVLDKRRGRDPEMGGKPRRKNPQEGLYNELQKDKMAEAYSEIGMKGERRRGKGHDGLYQGLSTATKDTYDALHMQALPPR

SEQ ID NO: 104 - protein, 486 aa, Artificial Sequence
  source: /note="Description of Artificial Sequence: Synthetic polypeptide"
MALPVTALLLPLALLLHAARPEIVMTQSPATLSLSPGERATLSCRASQDISKYLNWYQQKPGQAPRLLIYHTSRLHSGIPARFSGSGSGTDYTLTISSLQPEDFAVYFCQQGNTLPYTFGQGTKLEIKGGGGSGGGGSGGGGSQVQLQESGPGLVKPSETLSLTCTVSGVSLPDYGVSWIRQPPGKGLEWIGVIWGSETTYYNSSLKSRVTISKDNSKNQVSLKLSSVTAADTAVYYCAKHYYYGGSYAMDYWGQGTLVTVSSTTTPAPRPPTPAPTIASQPLSLRPEACRPAAGGAVHTRGLDFACDIYIWAPLAGTCGVLLLSLVITLYCKRGRKKLLYIFKQPFMRPVQTTQEEDGCSCRFPEEEEGGCELRVKFSRSADAPAYKQGQNQLYNELNLGRREEYDVLDKRRGRDPEMGGKPRRKNPQEGLYNELQKDKMAEAYSEIGMKGERRRGKGHDGLYQGLSTATKDTYDALHMQALPPR

SEQ ID NO: 105 - DNA, 813 bp, Artificial Sequence
  source: /note="Description of Artificial Sequence: Synthetic polynucleotide"
atggccctgcccgtcaccgctctgctgctgccccttgctctgcttcttcatgcagcaaggccggacatccagatgacccaaaccacctcatccctctctgcctctcttggagacagggtgaccatttcttgtcgcgccagccaggacatcagcaagtatctgaactggtatcagcagaagccggacggaaccgtgaagctcctgatctaccatacctctcgcctgcatagcggcgtgccctcacgcttctctggaagcggatcaggaaccgattattctctcactatttcaaatcttgagcaggaagatattgccacctatttctgccagcagggtaataccctgccctacaccttcggaggagggaccaagctcgaaatcaccggtggaggaggcagcggcggtggagggtctggtggaggtggttctgaggtgaagctgcaagaatcaggccctggacttgtggccccttcacagtccctgagcgtgacttgcaccgtgtccggagtctccctgcccgactacggagtgtcatggatcagacaacctccacggaaaggactggaatggctcggtgtcatctggggtagcgaaactacttactacaattcagccctcaaaagcaggctgactattatcaaggacaacagcaagtcccaagtctttcttaagatgaactcactccagactgacgacaccgcaatctactattgtgctaagcactactactacggaggatcctacgctatggattactggggacaaggtacttccgtcactgtctcttcacaccatcatcaccatcaccatcac

SEQ ID NO: 106 - protein, 271 aa, Artificial Sequence
  source: /note="Description of Artificial Sequence: Synthetic polypeptide"
MALPVTALLLPLALLLHAARPDIQMTQTTSSLSASLGDRVTISCRASQDISKYLNWYQQKPDGTVKLLIYHTSRLHSGVPSRFSGSGSGTDYSLTISNLEQEDIATYFCQQGNTLPYTFGGGTKLEITGGGGSGGGGSGGGGSEVKLQESGPGLVAPSQSLSVTCTVSGVSLPDYGVSWIRQPPRKGLEWLGVIWGSETTYYNSALKSRLTIIKDNSKSQVFLKMNSLQTDDTAIYYCAKHYYYGGSYAMDYWGQGTSVTVSSHHHHHHHH

SEQ ID NO: 107 - DNA, 1458 bp, Artificial Sequence
  source: /note="Description of Artificial Sequence: Synthetic polynucleotide"
atggccttaccagtgaccgccttgctcctgccgctggccttgctgctccacgccgccaggccggacatccagatgacacagactacatcctccctgtctgcctctctgggagacagagtcaccatcagttgcagggcaagtcaggacattagtaaatatttaaattggtatcagcagaaaccagatggaactgttaaactcctgatctaccatacatcaagattacactcaggagtcccatcaaggttcagtggcagtgggtctggaacagattattctctcaccattagcaacctggagcaagaagatattgccacttacttttgccaacagggtaatacgcttccgtacacgttcggaggggggaccaagctggagatcacaggtggcggtggctcgggcggtggtgggtcgggtggcggcggatctgaggtgaaactgcaggagtcaggacctggcctggtggcgccctcacagagcctgtccgtcacatgcactgtctcaggggtctcattacccgactatggtgtaagctggattcgccagcctccacgaaagggtctggagtggctgggagtaatatggggtagtgaaaccacatactataattcagctctcaaatccagactgaccatcatcaaggacaactccaagagccaagttttcttaaaaatgaacagtctgcaaactgatgacacagccatttactactgtgccaaacattattactacggtggtagctatgctatggactactggggccaaggaacctcagtcaccgtctcctcaaccacgacgccagcgccgcgaccaccaacaccggcgcccaccatcgcgtcgcagcccctgtccctgcgcccagaggcgtgccggccagcggcggggggcgcagtgcacacgagggggctggacttcgcctgtgatatctacatctgggcgcccttggccgggacttgtggggtccttctcctgtcactggttatcaccctttactgcaaacggggcagaaagaaactcctgtatatattcaaacaaccatttatgagaccagtacaaactactcaagaggaagatggctgtagctgccgatttccagaagaagaagaaggaggatgtgaactgagagtgaagttcagcaggagcgcagacgcccccgcgtacaagcagggccagaaccagctctataacgagctcaatctaggacgaagagaggagtacgatgttttggacaagagacgtggccgggaccctgagatggggggaaagccgagaaggaagaaccctcaggaaggcctgtacaatgaactgcagaaagataagatggcggaggcctacagtgagattgggatgaaaggcgagcgccggaggggcaaggggcacgatggcctttaccagggtctcagtacagccaccaaggacacctacgacgcccttcacatgcaggccctgccccctcgc

SEQ ID NO: 108 - protein, 486 aa, Artificial Sequence
  source: /note="Description of Artificial Sequence: Synthetic polypeptide"
MALPVTALLLPLALLLHAARPDIQMTQTTSSLSASLGDRVTISCRASQDISKYLNWYQQKPDGTVKLLIYHTSRLHSGVPSRFSGSGSGTDYSLTISNLEQEDIATYFCQQGNTLPYTFGGGTKLEITGGGGSGGGGSGGGGSEVKLQESGPGLVAPSQSLSVTCTVSGVSLPDYGVSWIRQPPRKGLEWLGVIWGSETTYYNSALKSRLTIIKDNSKSQVFLKMNSLQTDDTAIYYCAKHYYYGGSYAMDYWGQGTSVTVSSTTTPAPRPPTPAPTIASQPLSLRPEACRPAAGGAVHTRGLDFACDIYIWAPLAGTCGVLLLSLVITLYCKRGRKKLLYIFKQPFMRPVQTTQEEDGCSCRFPEEEEGGCELRVKFSRSADAPAYKQGQNQLYNELNLGRREEYDVLDKRRGRDPEMGGKPRRKNPQEGLYNELQKDKMAEAYSEIGMKGERRRGKGHDGLYQGLSTATKDTYDALHMQALPPR

SEQ ID NO: 109 - protein, 242 aa, Artificial Sequence
  source: /note="Description of Artificial Sequence: Synthetic polypeptide"
DIQMTQTTSSLSASLGDRVTISCRASQDISKYLNWYQQKPDGTVKLLIYHTSRLHSGVPSRFSGSGSGTDYSLTISNLEQEDIATYFCQQGNTLPYTFGGGTKLEITGGGGSGGGGSGGGGSEVKLQESGPGLVAPSQSLSVTCTVSGVSLPDYGVSWIRQPPRKGLEWLGVIWGSETTYYNSALKSRLTIIKDNSKSQVFLKMNSLQTDDTAIYYCAKHYYYGGSYAMDYWGQGTSVTVSS

SEQ ID NO: 110 - protein, 244 aa, Artificial Sequence
  source: /note="Description of Artificial Sequence: Synthetic polypeptide"
QVQLLESGAELVRPGSSVKISCKASGYAFSSYWMNWVKQRPGQGLEWIGQIYPGDGDTNYNGKFKGQATLTADKSSSTAYMQLSGLTSEDSAVYSCARKTISSVVDFYFDYWGQGTTVTGGGSGGGSGGGSGGGSELVLTQSPKFMSTSVGDRVSVTCKASQNVGTNVAWYQQKPGQSPKPLIYSATYRNSGVPDRFTGSGSGTDFTLTITNVQSKDLADYFCQYNRYPYTSFFFTKLEIKRRS

SEQ ID NO: 111 - protein, 464 aa, Artificial Sequence
  source: /note="Description of Artificial Sequence: Synthetic polypeptide"
QVQLLESGAELVRPGSSVKISCKASGYAFSSYWMNWVKQRPGQGLEWIGQIYPGDGDTNYNGKFKGQATLTADKSSSTAYMQLSGLTSEDSAVYSCARKTISSVVDFYFDYWGQGTTVTGGGSGGGSGGGSGGGSELVLTQSPKFMSTSVGDRVSVTCKASQNVGTNVAWYQQKPGQSPKPLIYSATYRNSGVPDRFTGSGSGTDFTLTITNVQSKDLADYFCQYNRYPYTSFFFTKLEIKRRSKIEVMYPPPYLDNEKSNGTIIHVKGKHLCPSPLFPGPSKPFWVLVVVGGVLACYSLLVTVAFIIFWVRSKRSRLLHSDYMNMTPRRPGPTRKHYQPYAPPRDFAAYRSRVKFSRSADAPAYQQGQNQLYNELNLGRREEYDVLDKRRGRDPEMGGKPRRKNPQEGLYNELQKDKMAEAYSEIGMKGERRRGKGHDGLYQGLSTATKDTYDALHMQALPPR

SEQ ID NO: 112 - protein, 246 aa, Artificial Sequence
  source: /note="Description of Artificial Sequence: Synthetic polypeptide"
DIQMTQTTSSLSASLGDRVTISCRASQDISKYLNWYQQKPDGTVKLLIYHTSRLHSGVPSRFSGSGSGTDYSLTISNLEQEDIATYFCQQGNTLPYTFGGGTKLEITGSTSGSGKPGSGEGSTKGEVKLQESGPGLVAPSQSLSVTCTVSGVSLPDYGVSWIRQPPRKGLEWLGVIWGSETTYYNSALKSRLTIIKDNSKSQVFLKMNSLQTDDTAIYYCAKHYYYGGSYAMDYWGQGTSVTVSSE

SEQ ID NO: 113 - protein, 439 aa, Artificial Sequence
  source: /note="Description of Artificial Sequence: Synthetic polypeptide"
DIQMTQTTSSLSASLGDRVTISCRASQDISKYLNWYQQKPDGTVKLLIYHTSRLHSGVPSRFSGSGSGTDYSLTISNLEQEDIATYFCQQGNTLPYTFGGGTKLEITGSTSGSGKPGSGEGSTKGEVKLQESGPGLVAPSQSLSVTCTVSGVSLPDYGVSWIRQPPRKGLEWLGVIWGSETTYYNSALKSRLTIIKDNSKSQVFLKMNSLQTDDTAIYYCAKHYYYGGSYAMDYWGQGTSVTVSSESKYGPPCPPCPMFWVLVVVGGVLACYSLLVTVAFIIFWVKRGRKKLLYIFKQPFMRPVQTTQEEDGCSCRFEEEEGGCELRVKFSRSADAPAYQQGQNQLYNELNLGRREEYDVLDKRRGRDPEMGGKPRRKNPQEGLYNELQKDKMAEAYSEIGMKGERRRGKGHDGLYQGLSTATKDTYDALHMQALPPRL

SEQ ID NO: 114 - protein, 819 aa, Artificial Sequence
  source: /note="Description of Artificial Sequence: Synthetic polypeptide"
DIQMTQTTSSLSASLGDRVTISCRASQDISKYLNWYQQKPDGTVKLLIYHTSRLHSGVPSRFSGSGSGTDYSLTISNLEQEDIATYFCQQGNTLPYTFGGGTKLEITGSTSGSGKPGSGEGSTKGEVKLQESGPGLVAPSQSLSVTCTVSGVSLPDYGVSWIRQPPRKGLEWLGVIWGSETTYYNSALKSRLTIIKDNSKSQVFLKMNSLQTDDTAIYYCAKHYYYGGSYAMDYWGQGTSVTVSSESKYGPPCPPCPMFWVLVVVGGVLACYSLLVTVAFIIFWVKRGRKKLLYIFKQPFMRPVQTTQEEDGCSCRFEEEEGGCELRVKFSRSADAPAYQQGQNQLYNELNLGRREEYDVLDKRRGRDPEMGGKPRRKNPQEGLYNELQKDKMAEAYSEIGMKGERRRGKGHDGLYQGLSTATKDTYDALHMQALPPRLEGGGEGRGSLLTCGDVEENPGPRMLLLVTSLLLCELPHPAFLLIPRKVCNGIGIGEFKDSLSINATNIKHFKNCTSISGDLHILPVAFRGDSFTHTPPLDPQELDILKTVKEITGFLLIQAWPENRTDLHAFENLEIIRGRTKQHGQFSLAVVSLNITSLGLRSLKEISDGDVIISGNKNLCYANTINWKKLFGTSGQKTKIISNRGENSCKATGQVCHALCSPEGCWGPEPRDCVSCRNVSRGRECVDKCNLLEGEPREFVENSECIQCHPECLPQAMNITCTGRGPDNCIQCAHYIDGPHCVKTCPAGVMGENNTLVWKYADAGHVCHLCHPNCTYGCTGPGLEGCPTNGPKIPSIATGMVGALLLLLVVALGIGLFM

SEQ ID NO: 115 - protein, 245 aa, Artificial Sequence
  source: /note="Description of Artificial Sequence: Synthetic polypeptide"
DIQMTQTTSSLSASLGDRVTISCRASQDISKYLNWYQQKPDGTVKLLIYHTSRLHSGVPSRFSGSGSGTDYSLTISNLEQEDIATYFCQQGNTLPYTFGGGTKLEITGSTSGSGKPGSGEGSTKGEVKLQESGPGLVAPSQSLSVTCTVSGVSLPDYGVSWIRQPPRKGLEWLGVIWGSETTYYNSALKSRLTIIKDNSKSQVFLKMNSLQTDDTAIYYCAKHYYYGGSYAMDYWGQGTSVTVSS

SEQ ID NO: 116 - protein, 467 aa, Artificial Sequence
  source: /note="Description of Artificial Sequence: Synthetic polypeptide"
DIQMTQTTSSLSASLGDRVTISCRASQDISKYLNWYQQKPDGTVKLLIYHTSRLHSGVPSRFSGSGSGTDYSLTISNLEQEDIATYFCQQGNTLPYTFGGGTKLEITGSTSGSGKPGSGEGSTKGEVKLQESGPGLVAPSQSLSVTCTVSGVSLPDYGVSWIRQPPRKGLEWLGVIWGSETTYYNSALKSRLTIIKDNSKSQVFLKMNSLQTDDTAIYYCAKHYYYGGSYAMDYWGQGTSVTVSSAAAIEVMYPPPYLDNEKSNGTIIHVKGKHLCPSPLFPGPSKPFWVLVVVGGVLACYSLLVTVAFIIFWVRSKRSRLLHSDYMNMTPRRPGPTRKHYQPYAPPRDFAAYRSRVKFSRSADAPAYQQGQNQLYNELNLGRREEYDVLDKRRGRDPEMGGKPRRKNPQEGLYNELQKDKMAEAYSEIGMKGERRRGKGHDGLYQGLSTATKDTYDALHMQALPPR

SEQ ID NO: 117 - protein, 5 aa, Artificial Sequence
  source: /note="Description of Artificial Sequence: Synthetic peptide"
DYGVS

SEQ ID NO: 118 - protein, 16 aa, Artificial Sequence
  source: /note="Description of Artificial Sequence: Synthetic peptide"
VIWGSETTYYNSALKS

SEQ ID NO: 119 - protein, 16 aa, Artificial Sequence
  source: /note="Description of Artificial Sequence: Synthetic peptide"
VIWGSETTYYSSSLKS

SEQ ID NO: 120 - protein, 16 aa, Artificial Sequence
  source: /note="Description of Artificial Sequence: Synthetic peptide"
VIWGSETTYYQSSLKS

SEQ ID NO: 121 - protein, 16 aa, Artificial Sequence
  source: /note="Description of Artificial Sequence: Synthetic peptide"
VIWGSETTYYNSSLKS

SEQ ID NO: 122 - protein, 12 aa, Artificial Sequence
  source: /note="Description of Artificial Sequence: Synthetic peptide"
HYYYGGSYAMDY

SEQ ID NO: 123 - protein, 11 aa, Artificial Sequence
  source: /note="Description of Artificial Sequence: Synthetic peptide"
RASQDISKYLN

SEQ ID NO: 124 - protein, 7 aa, Artificial Sequence
  source: /note="Description of Artificial Sequence: Synthetic peptide"
HTSRLHS

SEQ ID NO: 125 - protein, 9 aa, Artificial Sequence
  source: /note="Description of Artificial Sequence: Synthetic peptide"
QQGNTLPYT

SEQ ID NO: 126 - DNA, 521 bp, Artificial Sequence
  source: /note="Description of Artificial Sequence: Synthetic polynucleotide"
acccctctctccagccactaagccagttgctccctcggctgacggctgcacgcgaggcctccgaacgtcttacgccttgtggcgcgcccgtccttgtcccgggtgtgatggcggggtgtggggcggagggcgtggcggggaagggccggcgacgagagccgcgcgggacgactcgtcggcgataaccggtgtcgggtagcgccagccgcgcgacggtaacgagggaccgcgacaggcagacgctcccatgatcactctgcacgccgaaggcaaatagtgcaggccgtgcggcgcttggcgttccttggaagggctgaatccccgcctcgtccttcgcagcggccccccgggtgttcccatcgccgcttctaggcccactgcgacgcttgcctgcacttcttacacgctctgggtcccagccgcggcgacgcaaagggccttggtgcgggtctcgtcggcgcagggacgcgtttgggtcccgacggaaccttttccgcgttggggttggggcaccataagct

SEQ ID NO: 127 - DNA, 118 bp, Artificial Sequence
  source: /note="Description of Artificial Sequence: Synthetic polynucleotide"
acccctctctccagccactaagccagttgctccctcggctgacggctgcacgcgaggcctccgaacgtcttacgccttgtggcgcgcccgtccttgtcccgggtgtgatggcggggtg

SEQ ID NO: 128 - DNA, 221 bp, Artificial Sequence
  source: /note="Description of Artificial Sequence: Synthetic polynucleotide"
acccctctctccagccactaagccagttgctccctcggctgacggctgcacgcgaggcctccgaacgtcttacgccttgtggcgcgcccgtccttgtcccgggtgtgatggcggggtgtggggcggagggcgtggcggggaagggccggcgacgagagccgcgcgggacgactcgtcggcgataaccggtgtcgggtagcgccagccgcgcgacggtaacg

SEQ ID NO: 129 - DNA, 324 bp, Artificial Sequence
  source: /note="Description of Artificial Sequence: Synthetic polynucleotide"
acccctctctccagccactaagccagttgctccctcggctgacggctgcacgcgaggcctccgaacgtcttacgccttgtggcgcgcccgtccttgtcccgggtgtgatggcggggtgtggggcggagggcgtggcggggaagggccggcgacgagagccgcgcgggacgactcgtcggcgataaccggtgtcgggtagcgccagccgcgcgacggtaacgagggaccgcgacaggcagacgctcccatgatcactctgcacgccgaaggcaaatagtgcaggccgtgcggcgcttggcgttccttggaagggctgaatccccg

SEQ ID NO: 130 - DNA, 422 bp, Artificial Sequence
  source: /note="Description of Artificial Sequence: Synthetic polynucleotide"
acccctctctccagccactaagccagttgctccctcggctgacggctgcacgcgaggcctccgaacgtcttacgccttgtggcgcgcccgtccttgtcccgggtgtgatggcggggtgtggggcggagggcgtggcggggaagggccggcgacgagagccgcgcgggacgactcgtcggcgataaccggtgtcgggtagcgccagccgcgcgacggtaacgagggaccgcgacaggcagacgctcccatgatcactctgcacgccgaaggcaaatagtgcaggccgtgcggcgcttggcgttccttggaagggctgaatccccgcctcgtccttcgcagcggccccccgggtgttcccatcgccgcttctaggcccactgcgacgcttgcctgcacttcttacacgctctgggtcccagccg

SEQ ID NO: 131 - protein, 21 aa, Artificial Sequence
  source: /note="Description of Artificial Sequence: Synthetic peptide"
  VARIANT (1)..(3): /replace=" "
  misc_feature (1)..(21): /note="Variant residues given in the sequence have no preference with respect to those in the annotations for variant positions"
GSGEGRGSLLTCGDVEENPGP

SEQ ID NO: 132 - protein, 22 aa, Artificial Sequence
  source: /note="Description of Artificial Sequence: Synthetic peptide"
  VARIANT (1)..(3): /replace=" "
  misc_feature (1)..(22): /note="Variant residues given in the sequence have no preference with respect to those in the annotations for variant positions"
GSGATNFSLLKQAGDVEENPGP

SEQ ID NO: 133 - protein, 23 aa, Artificial Sequence
  source: /note="Description of Artificial Sequence: Synthetic peptide"
  VARIANT (1)..(3): /replace=" "
  misc_feature (1)..(23): /note="Variant residues given in the sequence have no preference with respect to those in the annotations for variant positions"
GSGQCTNYALLKLAGDVESNPGP

SEQ ID NO: 134 - protein, 25 aa, Artificial Sequence
  source: /note="Description of Artificial Sequence: Synthetic peptide"
  VARIANT (1)..(3): /replace=" "
  misc_feature (1)..(25): /note="Variant residues given in the sequence have no preference with respect to those in the annotations for variant positions"
GSGVKQTLNFDLLKLAGDVESNPGP

SEQ ID NO: 135 - protein, 1132 aa, Homo sapiens [sequence omitted]

SEQ ID NO: 136 - DNA, 4027 bp, Homo sapiens
caggcagcgtggtcctgctgcgcacgtgggaagccctggccccggccacccccgcgatgccgcgcgctccccgctgccgagccgtgcgctccctgctgcgcagccactaccgcgaggtgctgccgctggccacgttcgtgcggcgcctggggccccagggctggcggctggtgcagcgcggggacccggcggctttccgcgcgctggtggcccagtgcctggtgtgcgtgccctgggacgcacggccgccccccgccgccccctccttccgccaggtgtcctgcctgaaggagctggtggcccgagtgctgcagaggctgtgcgagcgcggcgcgaagaacgtgctggccttcggcttcgcgctgctggacggggcccgcgggggcccccccgaggccttcaccaccagcgtgcgcagctacctgcccaacacggtgaccgacgcactgcgggggagcggggcgtgggggctgctgttgcgccgcgtgggcgacgacgtgctggttcacctgctggcacgctgcgcgctctttgtgctggtggctcccagctgcgcctaccaggtgtgcgggccgccgctgtaccagctcggcgctgccactcaggcccggcccccgccacacgctagtggaccccgaaggcgtctgggatgcgaacgggcctggaaccatagcgtcagggaggccggggtccccctgggcctgccagccccgggtgcgaggaggcgcgggggcagtgccagccgaagtctgccgttgcccaagaggcccaggcgtggcgctgcccctgagccggagcggacgcccgttgggcaggggtcctgggcccacccgggcaggacgcgtggaccgagtgaccgtggtttctgtgtggtgtcacctgccagacccgccgaagaagccacctctttggagggtgcgctctctggcacgcgccactcccacccatccgtgggccgccagcaccacgcgggccccccatccacatcgcggccaccacgtccctgggacacgccttgtcccccggtgtacgccgagaccaagcacttcctctactcctcaggcgacaaggagcagctgcggccctccttcctactcagctctctgaggcccagcctgactggcgctcggaggctcgtggagaccatctttctgggttccaggccctggatgccagggactccccgcaggttgccccgcctgccccagcgctactggcaaatgcggcccctgtttctggagctgcttgggaaccacgcgcagtgcccctacggggtgctcctcaagacgcactgcccgctgcgagctgcggtcaccccagcagccggtgtctgtgcccgggagaagccccagggctctgtggcggcccccgaggaggaggacacagacccccgtcgcctggtgcagctgctccgccagcacagcagcccctggcaggtgtacggcttcgtgcgggcctgcctgcgccggctggtgcccccaggcctctggggctccaggcacaacgaacgccgcttcctcaggaacaccaagaagttcatctccctggggaagcatgccaagctctcgctgcaggagctgacgtggaagatgagcgtgcggggctgcgcttggctgcgcaggagcccaggggttggctgtgttccggccgcagagcaccgtctgcgtgaggagatcctggccaagttcctgcactggctgatgagtgtgtacgtcgtcgagctgctcaggtctttcttttatgtcacggagaccacgtttcaaaagaacaggctctttttctaccggaagagtgtctggagcaagttgcaaagcattggaatcagacagcacttgaagagggtgcagctgcgggagctgtcggaagcagaggtcaggcagcatcgggaagccaggcccgccctgctgacgtccagactccgcttcatccccaagcctgacgggctgcggccgattgtgaacatggactacgtcgtgggagccagaacgttccgcagagaaaagagggccgagcgtctcacctcgagggtgaaggcactgttcagcgtgctcaactacgagcgggcgcggcgccccggcctcctgggcgcctctgtgctgggcctggacgatatccacagggcctggcgcaccttcgtgctgcgtgtgcgggcccaggacccgccgcctgagctgtactttgtcaaggtggatgtgacgggcgcgtacgacaccatcccccaggacaggctcacggaggtcatcgccagcatcatcaaaccccagaacacgtactgcgtgcgtcggtatgccgtggtccagaaggccgcccatgggcacgtccgcaaggccttcaagagccacgtctctaccttgacagacctccagccgtacatgcgacagttcgtggctcacctgcaggagaccagcccgctgagggatgccgtcgtcatcgagcagagctcctccctgaatgaggccagcagtggcctcttcgacgtcttcctacgcttcatgtgccaccacgccgtgcgcatcaggggcaagtcctacgtccagtgccaggggatcccgcagggctccatcctctccacgctgctctgcagcctgtgctacggcgacatggagaacaagctgtttgcggggattcggcgggacgggctgctcctgcgtttggtggatgatttcttgttggtgacacctcacctcacccacgcgaaaaccttcctcaggaccctggtccgaggtgtccctgagtatggctgcgtggtgaacttgcggaagacagtggtgaacttccctgtagaagacgaggccctgggtggcacggcttttgttcagatgccggcccacggcctattcccctggtgcggcctgctgctggatacccggaccctggaggtgcagagcgactactccagctatgcccggacctccatcagagccagtctcaccttcaaccgcggcttcaaggctgggaggaacatgcgtcgcaaactctttggggtcttgcggctgaagtgtcacagcctgtttctggatttgcaggtgaacagcctccagacggtgtgcaccaacatctacaagatcctcctgctgcaggcgtacaggtttcacgcatgtgtgctgcagctcccatttcatcagcaagtttggaagaaccccacatttttcctgcgcgtcatctctgacacggcctccctctgctactccatcctgaaagccaagaacgcagggatgtcgctgggggccaagggcgccgccggccctctgccctccgaggccgtgcagtggctgtgccaccaagcattcctgctcaagctgactcgacaccgtgtcacctacgtgccactcctggggtcactcaggacagcccagacgcagctgagtcggaagctcccggggacgacgctgactgccctggaggccgcagccaacccggcactgccctcagacttcaagaccatcctggactgatggccacccgcccacagccaggccgagagcagacaccagcagccctgtcacgccgggctctacgtcccagggagggaggggcggcccacacccaggcccgcaccgctgggagtctgaggcctgagtgagtgtttggccgaggcctgcatgtccggctgaaggctgagtgtccggctgaggcctgagcgagtgtccagccaagggctgagtgtccagcacacctgccgtcttcacttccccacaggctggcgctcggctccaccccagggccagcttttcctcaccaggagcccggcttccactccccacataggaatagtccatccccagattcgccattgttcacccctcgccctgccctcctttgccttccacccccaccatccaggtggagaccctgagaaggaccctgggagctctgggaatttggagtgaccaaaggtgtgccctgtacacaggcgaggaccctgcacctggatgggggtccctgtgggtcaaattggggggaggtgctgtgggagtaaaatactgaatatatgagtttttcagttttgaaaaaaaaaaaaaaaaaa

SEQ ID NO: 137 - protein, 5 aa, Artificial Sequence
  source: /note="Description of Artificial Sequence: Synthetic peptide"
TYWMH

SEQ ID NO: 138 - protein, 17 aa, Artificial Sequence
  source: /note="Description of Artificial Sequence: Synthetic peptide"
NIYPGTGGSNFDEKFKN

SEQ ID NO: 139 - protein, 8 aa, Artificial Sequence
  source: /note="Description of Artificial Sequence: Synthetic peptide"
WTTGTGAY

SEQ ID NO: 140 - protein, 7 aa, Artificial Sequence
  source: /note="Description of Artificial Sequence: Synthetic peptide"
GYTFTTY

SEQ ID NO: 141 - protein, 6 aa, Artificial Sequence
  source: /note="Description of Artificial Sequence: Synthetic peptide"
YPGTGG

SEQ ID NO: 142 - protein, 117 aa, Artificial Sequence
  source: /note="Description of Artificial Sequence: Synthetic polypeptide"
QVQLQQPGSELVRPGASVKLSCKASGYTFTTYWMHWVRQRPGQGLEWIGNIYPGTGGSNFDEKFKNRTSLTVDTSSTTAYMHLASLTSEDSAVYYCTRWTTGTGAYWGQGTLVTVSA

SEQ ID NO: 143 - DNA, 351 bp, Artificial Sequence
  source: /note="Description of Artificial Sequence: Synthetic polynucleotide"
caggtccagctgcagcaacctgggtctgagctggtgaggcctggagcttcagtgaagctgtcctgcaaggcgtctggctacacattcaccacttactggatgcactgggtgaggcagaggcctggacaaggccttgagtggattggaaatatttatcctggtactggtggttctaacttcgatgagaagttcaaaaacaggacctcactgactgtagacacatcctccaccacagcctacatgcacctcgccagcctgacatctgaggactctgcggtctattactgtacaagatggactactgggacgggagcttattggggccaagggactctggtcactgtctctgca

SEQ ID NO: 144 - protein, 117 aa, Artificial Sequence
  source: /note="Description of Artificial Sequence: Synthetic polypeptide"
QVQLQQSGSELVRPGASVKLSCKASGYTFTTYWMHWVRQRPGQGLEWIGNIYPGTGGSNFDEKFKNRTSLTVDTSSTTAYMHLASLTSEDSAVYYCTRWTTGTGAYWGQGTLVTVSA

SEQ ID NO: 145 - DNA, 351 bp, Artificial Sequence
  source: /note="Description of Artificial Sequence: Synthetic polynucleotide"
caggtccagctgcagcagtctgggtctgagctggtgaggcctggagcttcagtgaagctgtcctgcaaggcgtctggctacacattcaccacttactggatgcactgggtgaggcagaggcctggacaaggccttgagtggattggaaatatttatcctggtactggtggttctaacttcgatgagaagttcaaaaacaggacctcactgactgtagacacatcctccaccacagcctacatgcacctcgccagcctgacatctgaggactctgcggtctattactgtacaagatggactactgggacgggagcttattggggccaagggactctggtcactgtctctgca

SEQ ID NO: 146 - protein, 17 aa, Artificial Sequence
  source: /note="Description of Artificial Sequence: Synthetic peptide"
KSSQSLLDSGNQKNFLT

SEQ ID NO: 147 - protein, 7 aa, Artificial Sequence
  source: /note="Description of Artificial Sequence: Synthetic peptide"
WASTRES

SEQ ID NO: 148 - protein, 9 aa, Artificial Sequence
  source: /note="Description of Artificial Sequence: Synthetic peptide"
QNDYSYPCT

SEQ ID NO: 149 - protein, 13 aa, Artificial Sequence
  source: /note="Description of Artificial Sequence: Synthetic peptide"
SQSLLDSGNQKNF

SEQ ID NO: 150 - protein, 3 aa, Artificial Sequence
  source: /note="Description of Artificial Sequence: Synthetic peptide"
WAS

SEQ ID NO: 151 - protein, 6 aa, Artificial Sequence
  source: /note="Description of Artificial Sequence: Synthetic peptide"
DYSYPC

SEQ ID NO: 152 - protein, 113 aa, Artificial Sequence
  source: /note="Description of Artificial Sequence: Synthetic polypeptide"
DIVMTQSPSSLTVTAGEKVTMSCKSSQSLLDSGNQKNFLTWYQQKPGQPPKLLIFWASTRESGVPDRFTGSGSVTDFTLTISSVQAEDLAVYYCQNDYSYPCTFGGGTKLEIK

SEQ ID NO: 153 - DNA, 339 bp, Artificial Sequence
  source: /note="Description of Artificial Sequence: Synthetic polynucleotide"
gacattgtgatgacccagtctccatcctccctgactgtgacagcaggagagaaggtcactatgagctgcaagtccagtcagagtctgttagacagtggaaatcaaaagaacttcttgacctggtaccagcagaaaccagggcagcctcctaaactgttgatcttctgggcatccactagggaatctggggtccctgatcgcttcacaggcagtggatctgtaacagatttcactctcaccatcagcagtgtgcaggctgaagacctggcagtttattactgtcagaatgattatagttatccgtgcacgttcggaggggggaccaagctggaaataaaa

SEQ ID NO: 154 - protein, 117 aa, Artificial Sequence
  source: /note="Description of Artificial Sequence: Synthetic polypeptide"
QVQLQQPGSELVRPGASVKLSCKASGYTFTTYWMHWVRQRPGQGLEWIGNIYPGTGGSNFDEKFKNRTSLTVDTSSTTAYMHLASLTSEDSAVYYCTRWTTGTGAYWGQGTTVTVSS

SEQ ID NO: 155 - DNA, 351 bp, Artificial Sequence
  source: /note="Description of Artificial Sequence: Synthetic polynucleotide"
caggtccagctgcagcagcctgggtctgagctggtgaggcctggagcttcagtgaagctgtcctgcaaggcgtctggctacacattcaccacttactggatgcactgggtgaggcagaggcctggacaaggccttgagtggattggaaatatttatcctggtactggtggttctaacttcgatgagaagttcaaaaacaggacctcactgactgtagacacatcctccaccacagcctacatgcacctcgccagcctgacatctgaggactctgcggtctattactgtacaagatggactactgggacgggagcttattggggccagggcaccaccgtgaccgtgtcctcc

SEQ ID NO: 156 - protein, 444 aa, Artificial Sequence
  source: /note="Description of Artificial Sequence: Synthetic polypeptide"
QVQLQQPGSELVRPGASVKLSCKASGYTFTTYWMHWVRQRPGQGLEWIGNIYPGTGGSNFDEKFKNRTSLTVDTSSTTAYMHLASLTSEDSAVYYCTRWTTGTGAYWGQGTTVTVSSASTKGPSVFPLAPCSRSTSESTAALGCLVKDYFPEPVTVSWNSGALTSGVHTFPAVLQSSGLYSLSSVVTVPSSSLGTKTYTCNVDHKPSNTKVDKRVESKYGPPCPPCPAPEFLGGPSVFLFPPKPKDTLMISRTPEVTCVVVDVSQEDPEVQFNWYVDGVEVHNAKTKPREEQFNSTYRVVSVLTVLHQDWLNGKEYKCKVSNKGLPSSIEKTISKAKGQPREPQVYTLPPSQEEMTKNQVSLTCLVKGFYPSDIAVEWESNGQPENNYKTTPPVLDSDGSFFLYSRLTVDKSRWQEGNVFSCSVMHEALHNHYTQKSLSLSLGK

SEQ ID NO: 157 - DNA, 1332 bp, Artificial Sequence
  source: /note="Description of Artificial Sequence: Synthetic polynucleotide"
caggtccagctgcagcagcctgggtctgagctggtgaggcctggagcttcagtgaagctgtcctgcaaggcgtctggctacacattcaccacttactggatgcactgggtgaggcagaggcctggacaaggccttgagtggattggaaatatttatcctggtactggtggttctaacttcgatgagaagttcaaaaacaggacctcactgactgtagacacatcctccaccacagcctacatgcacctcgccagcctgacatctgaggactctgcggtctattactgtacaagatggactactgggacgggagcttattggggccagggcaccaccgtgaccgtgtcctccgcttccaccaagggcccatccgtcttccccctggcgccctgctccaggagcacctccgagagcacagccgccctgggctgcctggtcaaggactacttccccgaaccggtgacggtgtcgtggaactcaggcgccctgaccagcggcgtgcacaccttcccggctgtcctacagtcctcaggactctactccctcagcagcgtggtgaccgtgccctccagcagcttgggcacgaagacctacacctgcaacgtagatcacaagcccagcaacaccaaggtggacaagagagttgagtccaaatatggtcccccatgcccaccgtgcccagcacctgagttcctggggggaccatcagtcttcctgttccccccaaaacccaaggacactctcatgatctcccggacccctgaggtcacgtgcgtggtggtggacgtgagccaggaagaccccgaggtccagttcaactggtacgtggatggcgtggaggtgcataatgccaagacaaagccgcgggaggagcagttcaacagcacgtaccgtgtggtcagcgtcctcaccgtcctgcaccaggactggctgaacggcaaggagtacaagtgcaaggtgtccaacaaaggcctcccgtcctccatcgagaaaaccatctccaaagccaaagggcagccccgagagccacaggtgtacaccctgcccccatcccaggaggagatgaccaagaaccaggtcagcctgacctgcctggtcaaaggcttctaccccagcgacatcgccgtggagtgggagagcaatgggcagccggagaacaactacaagaccacgcctcccgtgctggactccgacggctccttcttcctctacagcaggctaaccgtggacaagagcaggtggcaggaggggaatgtcttctcatgctccgtgatgcatgaggctctgcacaaccactacacacagaagagcctctccctgtctctgggtaaa

SEQ ID NO: 158 - protein, 117 aa, Artificial Sequence
  source: /note="Description of Artificial Sequence: Synthetic polypeptide"
QVQLQQSGSELVRPGASVKLSCKASGYTFTTYWMHWVRQRPGQGLEWIGNIYPGTGGSNFDEKFKNRTSLTVDTSSTTAYMHLASLTSEDSAVYYCTRWTTGTGAYWGQGTTVTVSS

SEQ ID NO: 159 - DNA, 351 bp, Artificial Sequence
  source: /note="Description of Artificial Sequence: Synthetic polynucleotide"
caggtccagctgcagcagtctgggtctgagctggtgaggcctggagcttcagtgaagctgtcctgcaaggcgtctggctacacattcaccacttactggatgcactgggtgaggcagaggcctggacaaggccttgagtggattggaaatatttatcctggtactggtggttctaacttcgatgagaagttcaaaaacaggacctcactgactgtagacacatcctccaccacagcctacatgcacctcgccagcctgacatctgaggactctgcggtctattactgtacaagatggactactgggacgggagcttattggggccagggcaccaccgtgaccgtgtcctcc

SEQ ID NO: 160 - protein, 444 aa, Artificial Sequence
  source: /note="Description of Artificial Sequence: Synthetic polypeptide"
QVQLQQSGSELVRPGASVKLSCKASGYTFTTYWMHWVRQRPGQGLEWIGNIYPGTGGSNFDEKFKNRTSLTVDTSSTTAYMHLASLTSEDSAVYYCTRWTTGTGAYWGQGTTVTVSSASTKGPSVFPLAPCSRSTSESTAALGCLVKDYFPEPVTVSWNSGALTSGVHTFPAVLQSSGLYSLSSVVTVPSSSLGTKTYTCNVDHKPSNTKVDKRVESKYGPPCPPCPAPEFLGGPSVFLFPPKPKDTLMISRTPEVTCVVVDVSQEDPEVQFNWYVDGVEVHNAKTKPREEQFNSTYRVVSVLTVLHQDWLNGKEYKCKVSNKGLPSSIEKTISKAKGQPREPQVYTLPPSQEEMTKNQVSLTCLVKGFYPSDIAVEWESNGQPENNYKTTPPVLDSDGSFFLYSRLTVDKSRWQEGNVFSCSVMHEALHNHYTQKSLSLSLGK

SEQ ID NO: 161 - DNA, 1332 bp, Artificial Sequence
  source: /note="Description of Artificial Sequence: Synthetic polynucleotide"
caggtccagctgcagcagtctgggtctgagctggtgaggcctggagcttcagtgaagctgtcctgcaaggcgtctggctacacattcaccacttactggatgcactgggtgaggcagaggcctggacaaggccttgagtggattggaaatatttatcctggtactggtggttctaacttcgatgagaagttcaaaaacaggacctcactgactgtagacacatcctccaccacagcctacatgcacctcgccagcctgacatctgaggactctgcggtctattactgtacaagatggactactgggacgggagcttattggggccagggcaccaccgtgaccgtgtcctccgcttccaccaagggcccatccgtcttccccctggcgccctgctccaggagcacctccgagagcacagccgccctgggctgcctggtcaaggactacttccccgaaccggtgacggtgtcgtggaactcaggcgccctgaccagcggcgtgcacaccttcccggctgtcctacagtcctcaggactctactccctcagcagcgtggtgaccgtgccctccagcagcttgggcacgaagacctacacctgcaacgtagatcacaagcccagcaacaccaaggtggacaagagagttgagtccaaatatggtcccccatgcccaccgtgcccagcacctgagttcctggggggaccatcagtcttcctgttccccccaaaacccaaggacactctcatgatctcccggacccctgaggtcacgtgcgtggtggtggacgtgagccaggaagaccccgaggtccagttcaactggtacgtggatggcgtggaggtgcataatgccaagacaaagccgcgggaggagcagttcaacagcacgtaccgtgtggtcagcgtcctcaccgtcctgcaccaggactggctgaacggcaaggagtacaagtgcaaggtgtccaacaaaggcctcccgtcctccatcgagaaaaccatctccaaagccaaagggcagccccgagagccacaggtgtacaccctgcccccatcccaggaggagatgaccaagaaccaggtcagcctgacctgcctggtcaaaggcttctaccccagcgacatcgccgtggagtgggagagcaatgggcagccggagaacaactacaagaccacgcctcccgtgctggactccgacggctccttcttcctctacagcaggctaaccgtggacaagagcaggtggcaggaggggaatgtcttctcatgctccgtgatgcatgaggctctgcacaaccactacacacagaagagcctctccctgtctctgggtaaa

SEQ ID NO: 162 - protein, 113 aa, Artificial Sequence
  source: /note="Description of Artificial Sequence: Synthetic polypeptide"
DIVMTQSPSSLTVTAGEKVTMSCKSSQSLLDSGNQKNFLTWYQQKPGQPPKLLIFWASTRESGVPDRFTGSGSVTDFTLTISSVQAEDLAVYYCQNDYSYPCTFGQGTKVEIK

SEQ ID NO: 163 - DNA, 339 bp, Artificial Sequence
  source: /note="Description of Artificial Sequence: Synthetic polynucleotide"
gacattgtgatgacccagtctccatcctccctgactgtgacagcaggagagaaggtcactatgagctgcaagtccagtcagagtctgttagacagtggaaatcaaaagaacttcttgacctggtaccagcagaaaccagggcagcctcctaaactgttgatcttctgggcatccactagggaatctggggtccctgatcgcttcacaggcagtggatctgtaacagatttcactctcaccatcagcagtgtgcaggctgaagacctggcagtttattactgtcagaatgattatagttatccgtgcacgttcggccaagggaccaaggtggaaatcaaa

SEQ ID NO: 164 - protein, 220 aa, Artificial Sequence
  source: /note="Description of Artificial Sequence: Synthetic polypeptide"
DIVMTQSPSSLTVTAGEKVTMSCKSSQSLLDSGNQKNFLTWYQQKPGQPPKLLIFWASTRESGVPDRFTGSGSVTDFTLTISSVQAEDLAVYYCQNDYSYPCTFGQGTKVEIKRTVAAPSVFIFPPSDEQLKSGTASVVCLLNNFYPREAKVQWKVDNALQSGNSQESVTEQDSKDSTYSLSSTLTLSKADYEKHKVYACEVTHQGLSSPVTKSFNRGEC

SEQ ID NO: 165 - DNA, 660 bp, Artificial Sequence
  source: /note="Description of Artificial Sequence: Synthetic polynucleotide"
gacattgtgatgacccagtctccatcctccctgactgtgacagcaggagagaaggtcactatgagctgcaagtccagtcagagtctgttagacagtggaaatcaaaagaacttcttgacctggtaccagcagaaaccagggcagcctcctaaactgttgatcttctgggcatccactagggaatctggggtccctgatcgcttcacaggcagtggatctgtaacagatttcactctcaccatcagcagtgtgcaggctgaagacctggcagtttattactgtcagaatgattatagttatccgtgcacgttcggccaagggaccaaggtggaaatcaaacgtacggtggctgcaccatctgtcttcatcttcccgccatctgatgagcagttgaaatctggaactgcctctgttgtgtgcctgctgaataacttctatcccagagaggccaaagtacagtggaaggtggataacgccctccaatcgggtaactcccaggagagtgtcacagagcaggacagcaaggacagcacctacagcctcagcagcaccctgacgctgagcaaagcagactacgagaaacacaaagtctacgcctgcgaagtcacccatcagggcctgagctcgcccgtcacaaagagcttcaacaggggagagtgt

SEQ ID NO: 166 - protein, 9 aa, Artificial Sequence
  source: /note="Description of Artificial Sequence: Synthetic peptide"
QNDYSYPYT

SEQ ID NO: 167 - protein, 6 aa, Artificial Sequence
  source: /note="Description of Artificial Sequence: Synthetic peptide"
DYSYPY

SEQ ID NO: 168 - protein, 113 aa, Artificial Sequence
  source: /note="Description of Artificial Sequence: Synthetic polypeptide"
DIVMTQSPSSLTVTAGEKVTMSCKSSQSLLDSGNQKNFLTWYQQKPGQPPKLLIFWASTRESGVPDRFTGSGSVTDFTLTISSVQAEDLAVYYCQNDYSYPYTFGQGTKVEIK

SEQ ID NO: 169 - DNA, 339 bp, Artificial Sequence
  source: /note="Description of Artificial Sequence: Synthetic polynucleotide"
gacattgtgatgacccagtctccatcctccctgactgtgacagcaggagagaaggtcactatgagctgcaagtccagtcagagtctgttagacagtggaaatcaaaagaacttcttgacctggtaccagcagaaaccagggcagcctcctaaactgttgatcttctgggcatccactagggaatctggggtccctgatcgcttcacaggcagtggatctgtaacagatttcactctcaccatcagcagtgtgcaggctgaagacctggcagtttattactgtcagaatgattatagttatccgtacacgttcggccaagggaccaaggtggaaatcaaa

SEQ ID NO: 170 - protein, 220 aa, Artificial Sequence
  source: /note="Description of Artificial Sequence: Synthetic polypeptide"
DIVMTQSPSSLTVTAGEKVTMSCKSSQSLLDSGNQKNFLTWYQQKPGQPPKLLIFWASTRESGVPDRFTGSGSVTDFTLTISSVQAEDLAVYYCQNDYSYPYTFGQGTKVEIKRTVAAPSVFIFPPSDEQLKSGTASVVCLLNNFYPREAKVQWKVDNALQSGNSQESVTEQDSKDSTYSLSSTLTLSKADYEKHKVYACEVTHQGLSSPVTKSFNRGEC

SEQ ID NO: 171 - DNA, 660 bp, Artificial Sequence
  source: /note="Description of Artificial Sequence: Synthetic polynucleotide"
gacattgtgatgacccagtctccatcctccctgactgtgacagcaggagagaaggtcactatgagctgcaagtccagtcagagtctgttagacagtggaaatcaaaagaacttcttgacctggtaccagcagaaaccagggcagcctcctaaactgttgatcttctgggcatccactagggaatctggggtccctgatcgcttcacaggcagtggatctgtaacagatttcactctcaccatcagcagtgtgcaggctgaagacctggcagtttattactgtcagaatgattatagttatccgtacacgttcggccaagggaccaaggtggaaatcaaacgtacggtggctgcaccatctgtcttcatcttcccgccatctgatgagcagttgaaatctggaactgcctctgttgtgtgcctgctgaataacttctatcccagagaggccaaagtacagtggaaggtggataacgccctccaatcgggtaactcccaggagagtgtcacagagcaggacagcaaggacagcacctacagcctcagcagcaccctgacgctgagcaaagcagactacgagaaacacaaagtctacgcctgcgaagtcacccatcagggcctgagctcgcccgtcacaaagagcttcaacaggggagagtgt

SEQ ID NO: 172 - protein, 117 aa, Artificial Sequence
  source: /note="Description of Artificial Sequence: Synthetic polypeptide"
EVQLVQSGAEVKKPGESLRISCKGSGYTFTTYWMHWVRQATGQGLEWMGNIYPGTGGSNFDEKFKNRVTITADKSTSTAYMELSSLRSEDTAVYYCTRWTTGTGAYWGQGTTVTVSS

SEQ ID NO: 173 - DNA, 351 bp, Artificial Sequence
  source: /note="Description of Artificial Sequence: Synthetic polynucleotide"
gaagtgcagctggtgcagtctggagcagaggtgaaaaagcccggggagtctctgaggatctcctgtaagggttctggctacacattcaccacttactggatgcactgggtgcgacaggccactggacaagggcttgagtggatgggtaatatttatcctggtactggtggttctaacttcgatgagaagttcaagaacagagtcacgattaccgcggacaaatccacgagcacagcctacatggagctgagcagcctgagatctgaggacacggccgtgtattactgtacaagatggactactgggacgggagcttattggggccagggcaccaccgtgaccgtgtcctcc

SEQ ID NO: 174 - protein, 444 aa, Artificial Sequence
  source: /note="Description of Artificial Sequence: Synthetic polypeptide"
EVQLVQSGAEVKKPGESLRISCKGSGYTFTTYWMHWVRQATGQGLEWMGNIYPGTGGSNFDEKFKNRVTITADKSTSTAYMELSSLRSEDTAVYYCTRWTTGTGAYWGQGTTVTVSSASTKGPSVFPLAPCSRSTSESTAALGCLVKDYFPEPVTVSWNSGALTSGVHTFPAVLQSSGLYSLSSVVTVPSSSLGTKTYTCNVDHKPSNTKVDKRVESKYGPPCPPCPAPEFLGGPSVFLFPPKPKDTLMISRTPEVTCVVVDVSQEDPEVQFNWYVDGVEVHNAKTKPREEQFNSTYRVVSVLTVLHQDWLNGKEYKCKVSNKGLPSSIEKTISKAKGQPREPQVYTLPPSQEEMTKNQVSLTCLVKGFYPSDIAVEWESNGQPENNYKTTPPVLDSDGSFFLYSRLTVDKSRWQEGNVFSCSVMHEALHNHYTQKSLSLSLGK

SEQ ID NO: 175 - DNA, 1332 bp, Artificial Sequence
  source: /note="Description of Artificial Sequence: Synthetic polynucleotide"
gaagtgcagctggtgcagtctggagcagaggtgaaaaagcccggggagtctctgaggatctcctgtaagggttctggctacacattcaccacttactggatgcactgggtgcgacaggccactggacaagggcttgagtggatgggtaatatttatcctggtactggtggttctaacttcgatgagaagttcaagaacagagtcacgattaccgcggacaaatccacgagcacagcctacatggagctgagcagcctgagatctgaggacacggccgtgtattactgtacaagatggactactgggacgggagcttattggggccagggcaccaccgtgaccgtgtcctccgcttccaccaagggcccatccgtcttccccctggcgccctgctccaggagcacctccgagagcacagccgccctgggctgcctggtcaaggactacttccccgaaccggtgacggtgtcgtggaactcaggcgccctgaccagcggcgtgcacaccttcccggctgtcctacagtcctcaggactctactccctcagcagcgtggtgaccgtgccctccagcagcttgggcacgaagacctacacctgcaacgtagatcacaagcccagcaacaccaaggtggacaagagagttgagtccaaatatggtcccccatgcccaccgtgcccagcacctgagttcctggggggaccatcagtcttcctgttccccccaaaacccaaggacactctcatgatctcccggacccctgaggtcacgtgcgtggtggtggacgtgagccaggaagaccccgaggtccagttcaactggtacgtggatggcgtggaggtgcataatgccaagacaaagccgcgggaggagcagttcaacagcacgtaccgtgtggtcagcgtcctcaccgtcctgcaccaggactggctgaacggcaaggagtacaagtgcaaggtgtccaacaaaggcctcccgtcctccatcgagaaaaccatctccaaagccaaagggcagccccgagagccacaggtgtacaccctgcccccatcccaggaggagatgaccaagaaccaggtcagcctgacctgcctggtcaaaggcttctaccccagcgacatcgccgtggagtgggagagcaatgggcagccggagaacaactacaagaccacgcctcccgtgctggactccgacggctccttcttcctctacagcaggctaaccgtggacaagagcaggtggcaggaggggaatgtcttctcatgctccgtgatgcatgaggctctgcacaaccactacacacagaagagcctctccctgtctctgggtaaa

SEQ ID NO: 176 - protein, 113 aa, Artificial Sequence
  source: /note="Description of Artificial Sequence: Synthetic polypeptide"
EIVLTQSPATLSLSPGERATLSCKSSQSLLDSGNQKNFLTWYQQKPGQAPRLLIYWASTRESGVPSRFSGSGSGTEFTLTISSLQPDDFATYYCQNDYSYPYTFGQGTKVEIK

SEQ ID NO: 177 - DNA, 339 bp, Artificial Sequence
  source: /note="Description of Artificial Sequence: Synthetic polynucleotide"
gaaattgtgttgacacagtctccagccaccctgtctttgtctccaggggaaagagccaccctctcctgcaagtccagtcagagtctgttagacagtggaaatcaaaagaacttcttgacctggtaccagcagaaacctggccaggctcccaggctcctcatctattgggcatccactagggaatctggggtcccatcaaggttcagcggcagtggatctgggacagaattcactctcaccatcagcagcctgcagcctgatgattttgcaacttattactgtcagaatgattatagttatccgtacacgttcggccaagggaccaaggtggaaatcaaa

SEQ ID NO: 178 - protein, 220 aa, Artificial Sequence
  source: /note="Description of Artificial Sequence: Synthetic polypeptide"
EIVLTQSPATLSLSPGERATLSCKSSQSLLDSGNQKNFLTWYQQKPGQAPRLLIYWASTRESGVPSRFSGSGSGTEFTLTISSLQPDDFATYYCQNDYSYPYTFGQGTKVEIKRTVAAPSVFIFPPSDEQLKSGTASVVCLLNNFYPREAKVQWKVDNALQSGNSQESVTEQDSKDSTYSLSSTLTLSKADYEKHKVYACEVTHQGLSSPVTKSFNRGEC

SEQ ID NO: 179 - DNA, 660 bp, Artificial Sequence
  source: /note="Description of Artificial Sequence: Synthetic polynucleotide"
gaaattgtgttgacacagtctccagccaccctgtctttgtctccaggggaaagagccaccctctcctgcaagtccagtcagagtctgttagacagtggaaatcaaaagaacttcttgacctggtaccagcagaaacctggccaggctcccaggctcctcatctattgggcatccactagggaatctggggtcccatcaaggttcagcggcagtggatctgggacagaattcactctcaccatcagcagcctgcagcctgatgattttgcaacttattactgtcagaatgattatagttatccgtacacgttcggccaagggaccaaggtggaaatcaaacgtacggtggctgcaccatctgtcttcatcttcccgccatctgatgagcagttgaaatctggaactgcctctgttgtgtgcctgctgaataacttctatcccagagaggccaaagtacagtggaaggtggataacgccctccaatcgggtaactcccaggagagtgtcacagagcaggacagcaaggacagcacctacagcctcagcagcaccctgacgctgagcaaagcagactacgagaaacacaaagtctacgcctgcgaagtcacccatcagggcctgagctcgcccgtcacaaagagcttcaacaggggagagtgt

SEQ ID NO: 180 - protein, 113 aa, Artificial Sequence
  source: /note="Description of Artificial Sequence: Synthetic polypeptide"
DIQMTQSPSSLSASVGDRVTITCKSSQSLLDSGNQKNFLTWYQQKPGQAPRLLIYWASTRESGIPPRFSGSGYGTDFTLTINNIESEDAAYYFCQNDYSYPYTFGQGTKVEIK

SEQ ID NO: 181 - DNA, 339 bp, Artificial Sequence
  source: /note="Description of Artificial Sequence: Synthetic polynucleotide"
gacatccagatgacccagtctccatcctccctgtctgcatctgtaggagacagagtcaccatcacttgcaagtccagtcagagtctgttagacagtggaaatcaaaagaacttcttgacctggtaccagcagaaacctggccaggctcccaggctcctcatctattgggcatccactagggaatctgggatcccacctcgattcagtggcagcgggtatggaacagattttaccctcacaattaataacatagaatctgaggatgctgcatattacttctgtcagaatgattatagttatccgtacacgttcggccaagggaccaaggtggaaatcaaa

SEQ ID NO: 182 - protein, 220 aa, Artificial Sequence
  source: /note="Description of Artificial Sequence: Synthetic polypeptide"
DIQMTQSPSSLSASVGDRVTITCKSSQSLLDSGNQKNFLTWYQQKPGQAPRLLIYWASTRESGIPPRFSGSGYGTDFTLTINNIESEDAAYYFCQNDYSYPYTFGQGTKVEIKRTVAAPSVFIFPPSDEQLKSGTASVVCLLNNFYPREAKVQWKVDNALQSGNSQESVTEQDSKDSTYSLSSTLTLSKADYEKHKVYACEVTHQGLSSPVTKSFNRGEC

SEQ ID NO: 183 - DNA, 660 bp, Artificial Sequence
  source: /note="Description of Artificial Sequence: Synthetic polynucleotide"
gacatccagatgacccagtctccatcctccctgtctgcatctgtaggagacagagtcaccatcacttgcaagtccagtcagagtctgttagacagtggaaatcaaaagaacttcttgacctggtaccagcagaaacctggccaggctcccaggctcctcatctattgggcatccactagggaatctgggatcccacctcgattcagtggcagcgggtatggaacagattttaccctcacaattaataacatagaatctgaggatgctgcatattacttctgtcagaatgattatagttatccgtacacgttcggccaagggaccaaggtggaaatcaaacgtacggtggctgcaccatctgtcttcatcttcccgccatctgatgagcagttgaaatctggaactgcctctgttgtgtgcctgctgaataacttctatcccagagaggccaaagtacagtggaaggtggataacgccctccaatcgggtaactcccaggagagtgtcacagagcaggacagcaaggacagcacctacagcctcagcagcaccctgacgctgagcaaagcagactacgagaaacacaaagtctacgcctgcgaagtcacccatcagggcctgagctcgcccgtcacaaagagcttcaacaggggagagtgt

SEQ ID NO: 184 - protein, 117 aa, Artificial Sequence
  source: /note="Description of Artificial Sequence: Synthetic polypeptide"
EVQLVQSGAEVKKPGESLRISCKGSGYTFTTYWMHWIRQSPSRGLEWLGNIYPGTGGSNFDEKFKNRFTISRDNSKNTLYLQMNSLRAEDTAVYYCTRWTTGTGAYWGQGTTVTVSS

SEQ ID NO: 185 - DNA, 351 bp, Artificial Sequence
  source: /note="Description of Artificial Sequence: Synthetic polynucleotide"
gaagtgcagctggtgcagtctggagcagaggtgaaaaagcccggggagtctctgaggatctcctgtaagggttctggctacacattcaccacttactggatgcactggatcaggcagtccccatcgagaggccttgagtggctgggtaatatttatcctggtactggtggttctaacttcgatgagaagttcaagaacagattcaccatctccagagacaattccaagaacacgctgtatcttcaaatgaacagcctgagagccgaggacacggccgtgtattactgtacaagatggactactgggacgggagcttattggggccagggcaccaccgtgaccgtgtcctcc

SEQ ID NO: 186 - protein, 444 aa, Artificial Sequence
  source: /note="Description of Artificial Sequence: Synthetic polypeptide"
EVQLVQSGAEVKKPGESLRISCKGSGYTFTTYWMHWIRQSPSRGLEWLGNIYPGTGGSNFDEKFKNRFTISRDNSKNTLYLQMNSLRAEDTAVYYCTRWTTGTGAYWGQGTTVTVSSASTKGPSVFPLAPCSRSTSESTAALGCLVKDYFPEPVTVSWNSGALTSGVHTFPAVLQSSGLYSLSSVVTVPSSSLGTKTYTCNVDHKPSNTKVDKRVESKYGPPCPPCPAPEFLGGPSVFLFPPKPKDTLMISRTPEVTCVVVDVSQEDPEVQFNWYVDGVEVHNAKTKPREEQFNSTYRVVSVLTVLHQDWLNGKEYKCKVSNKGLPSSIEKTISKAKGQPREPQVYTLPPSQEEMTKNQVSLTCLVKGFYPSDIAVEWESNGQPENNYKTTPPVLDSDGSFFLYSRLTVDKSRWQEGNVFSCSVMHEALHNHYTQKSLSLSLGK

SEQ ID NO: 187 - DNA, 1332 bp, Artificial Sequence
  source: /note="Description of Artificial Sequence: Synthetic polynucleotide"
gaagtgcagctggtgcagtctggagcagaggtgaaaaagcccggggagtctctgaggatctcctgtaagggttctggctacacattcaccacttactggatgcactggatcaggcagtccccatcgagaggccttgagtggctgggtaatatttatcctggtactggtggttctaacttcgatgagaagttcaagaacagattcaccatctccagagacaattccaagaacacgctgtatcttcaaatgaacagcctgagagccgaggacacggccgtgtattactgtacaagatggactactgggacgggagcttattggggccagggcaccaccgtgaccgtgtcctccgcttccaccaagggcccatccgtcttccccctggcgccctgctccaggagcacctccgagagcacagccgccctgggctgcctggtcaaggactacttccccgaaccggtgacggtgtcgtggaactcaggcgccctgaccagcggcgtgcacaccttcccggctgtcctacagtcctcaggactctactccctcagcagcgtggtgaccgtgccctccagcagcttgggcacgaagacctacacctgcaacgtagatcacaagcccagcaacaccaaggtggacaagagagttgagtccaaatatggtcccccatgcccaccgtgcccagcacctgagttcctggggggaccatcagtcttcctgttccccccaaaacccaaggacactctcatgatctcccggacccctgaggtcacgtgcgtggtggtggacgtgagccaggaagaccccgaggtccagttcaactggtacgtggatggcgtggaggtgcataatgccaagacaaagccgcgggaggagcagttcaacagcacgtaccgtgtggtcagcgtcctcaccgtcctgcaccaggactggctgaacggcaaggagtacaagtgcaaggtgtccaacaaaggcctcccgtcctccatcgagaaaaccatctccaaagccaaagggcagccccgagagccacaggtgtacaccctgcccccatcccaggaggagatgaccaagaaccaggtcagcctgacctgcctggtcaaaggcttctaccccagcgacatcgccgtggagtgggagagcaatgggcagccggagaacaactacaagaccacgcctcccgtgctggactccgacggctccttcttcctctacagcaggctaaccgtggacaagagcaggtggcaggaggggaatgtcttctcatgctccgtgatgcatgaggctctgcacaaccactacacacagaagagcctctccctgtctctgggtaaa

SEQ ID NO: 188 - protein, 113 aa, Artificial Sequence
  source: /note="Description of Artificial Sequence: Synthetic polypeptide"
EIVLTQSPATLSLSPGERATLSCKSSQSLLDSGNQKNFLTWYQQKPGKAPKLLIYWASTRESGVPSRFSGSGSGTDFTFTISSLQPEDIATYYCQNDYSYPYTFGQGTKVEIK

SEQ ID NO: 189 - DNA, 339 bp, Artificial Sequence
  source: /note="Description of Artificial Sequence: Synthetic polynucleotide"
gaaattgtgttgacacagtctccagccaccctgtctttgtctccaggggaaagagccaccctctcctgcaagtccagtcagagtctgttagacagtggaaatcaaaagaacttcttgacctggtatcagcagaaaccagggaaagctcctaagctcctgatctattgggcatccactagggaatctggggtcccatcaaggttcagtggaagtggatctgggacagattttactttcaccatcagcagcctgcagcctgaagatattgcaacatattactgtcagaatgattatagttatccgtacacgttcggccaagggaccaaggtggaaatcaaa

SEQ ID NO: 190 - protein, 220 aa, Artificial Sequence
  source: /note="Description of Artificial Sequence: Synthetic polypeptide"
EIVLTQSPATLSLSPGERATLSCKSSQSLLDSGNQKNFLTWYQQKPGKAPKLLIYWASTRESGVPSRFSGSGSGTDFTFTISSLQPEDIATYYCQNDYSYPYTFGQGTKVEIKRTVAAPSVFIFPPSDEQLKSGTASVVCLLNNFYPREAKVQWKVDNALQSGNSQESVTEQDSKDSTYSLSSTLTLSKADYEKHKVYACEVTHQGLSSPVTKSFNRGEC

SEQ ID NO: 191 - DNA, 660 bp, Artificial Sequence
  source: /note="Description of Artificial Sequence: Synthetic polynucleotide"
gaaattgtgttgacacagtctccagccaccctgtctttgtctccaggggaaagagccaccctctcctgcaagtccagtcagagtctgttagacagtggaaatcaaaagaacttcttgacctggtatcagcagaaaccagggaaagctcctaagctcctgatctattgggcatccactagggaatctggggtcccatcaaggttcagtggaagtggatctgggacagattttactttcaccatcagcagcctgcagcctgaagatattgcaacatattactgtcagaatgattatagttatccgtacacgttcggccaagggaccaaggtggaaatcaaacgtacggtggctgcaccatctgtcttcatcttcccgccatctgatgagcagttgaaatctggaactgcctctgttgtgtgcctgctgaataacttctatcccagagaggccaaagtacagtggaaggtggataacgccctccaatcgggtaactcccaggagagtgtcacagagcaggacagcaaggacagcacctacagcctcagcagcaccctgacgctgagcaaagcagactacgagaaacacaaagtctacgcctgcgaagtcacccatcagggcctgagctcgcccgtcacaaagagcttcaacaggggagagtgt

SEQ ID NO: 192 - protein, 113 aa, Artificial Sequence
  source: /note="Description of Artificial Sequence: Synthetic polypeptide"
DIVMTQTPLSLPVTPGEPASISCKSSQSLLDSGNQKNFLTWYQQKPGQAPRLLIYWASTRESGVPSRFSGSGSGTDFTFTISSLEAEDAATYYCQNDYSYPYTFGQGTKVEIK

SEQ ID NO: 193 - DNA, 339 bp, Artificial Sequence
  source: /note="Description of Artificial Sequence: Synthetic polynucleotide"
gatattgtgatgacccagactccactctccctgcccgtcacccctggagagccggcctccatctcctgcaagtccagtcagagtctgttagacagtggaaatcaaaagaacttcttgacctggtaccagcagaaacctggccaggctcccaggctcctcatctattgggcatccactagggaatctggggtcccctcgaggttcagtggcagtggatctgggacagatttcacctttaccatcagtagcctggaagctgaagatgctgcaacatattactgtcagaatgattatagttatccgtacacgttcggccaagggaccaaggtggaaatcaaa

SEQ ID NO: 194 - protein, 220 aa, Artificial Sequence
  source: /note="Description of Artificial Sequence: Synthetic polypeptide"
DIVMTQTPLSLPVTPGEPASISCKSSQSLLDSGNQKNFLTWYQQKPGQAPRLLIYWASTRESGVPSRFSGSGSGTDFTFTISSLEAEDAATYYCQNDYSYPYTFGQGTKVEIKRTVAAPSVFIFPPSDEQLKSGTASVVCLLNNFYPREAKVQWKVDNALQSGNSQESVTEQDSKDSTYSLSSTLTLSKADYEKHKVYACEVTHQGLSSPVTKSFNRGEC

SEQ ID NO: 195 - DNA, 660 bp, Artificial Sequence
  source: /note="Description of Artificial Sequence: Synthetic polynucleotide"
gatattgtgatgacccagactccactctccctgcccgtcacccctggagagccggcctccatctcctgcaagtccagtcagagtctgttagacagtggaaatcaaaagaacttcttgacctggtaccagcagaaacctggccaggctcccaggctcctcatctattgggcatccactagggaatctggggtcccctcgaggttcagtggcagtggatctgggacagatttcacctttaccatcagtagcctggaagctgaagatgctgcaacatattactgtcagaatgattatagttatccgtacacgttcggccaagggaccaaggtggaaatcaaacgtacggtggctgcaccatctgtcttcatcttcccgccatctgatgagcagttgaaatctggaactgcctctgttgtgtgcctgctgaataacttctatcccagagaggccaaagtacagtggaaggtggataacgccctccaatcgggtaactcccaggagagtgtcacagagcaggacagcaaggacagcacctacagcctcagcagcaccctgacgctgagcaaagcagactacgagaaacacaaagtctacgcctgcgaagtcacccatcagggcctgagctcgcccgtcacaaagagcttcaacaggggagagtgt

SEQ ID NO: 196 - protein, 113 aa, Artificial Sequence
  source: /note="Description of Artificial Sequence: Synthetic polypeptide"
EIVLTQSPATLSLSPGERATLSCKSSQSLLDSGNQKNFLTWYQQKPGKAPKLLIYWASTRESGVPSRFSGSGSGTDFTFTISSLEAEDAATYYCQNDYSYPYTFGQGTKVEIK

SEQ ID NO: 197 - DNA, 339 bp, Artificial Sequence
  source: /note="Description of Artificial Sequence: Synthetic polynucleotide"
gaaattgtgttgacacagtctccagccaccctgtctttgtctccaggggaaagagccaccctctcctgcaagtccagtcagagtctgttagacagtggaaatcaaaagaacttcttgacctggtatcagcagaaaccagggaaagctcctaagctcctgatctattgggcatccactagggaatctggggtcccctcgaggttcagtggcagtggatctgggacagatttcacctttaccatcagtagcctggaagctgaagatgctgcaacatattactgtcagaatgattatagttatccgtacacgttcggccaagggaccaaggtggaaatcaaa

SEQ ID NO: 198 - protein, 220 aa, Artificial Sequence
  source: /note="Description of Artificial Sequence: Synthetic polypeptide"
EIVLTQSPATLSLSPGERATLSCKSSQSLLDSGNQKNFLTWYQQKPGKAPKLLIYWASTRESGVPSRFSGSGSGTDFTFTISSLEAEDAATYYCQNDYSYPYTFGQGTKVEIKRTVAAPSVFIFPPSDEQLKSGTASVVCLLNNFYPREAKVQWKVDNALQSGNSQESVTEQDSKDSTYSLSSTLTLSKADYEKHKVYACEVTHQGLSSPVTKSFNRGEC

SEQ ID NO: 199 - DNA, 660 bp, Artificial Sequence
  source: /note="Description of Artificial Sequence: Synthetic polynucleotide"
gaaattgtgttgacacagtctccagccaccctgtctttgtctccaggggaaagagccaccctctcctgcaagtccagtcagagtctgttagacagtggaaatcaaaagaacttcttgacctggtatcagcagaaaccagggaaagctcctaagctcctgatctattgggcatccactagggaatctggggtcccctcgaggttcagtggcagtggatctgggacagatttcacctttaccatcagtagcctggaagctgaagatgctgcaacatattactgtcagaatgattatagttatccgtacacgttcggccaagggaccaaggtggaaatcaaacgtacggtggctgcaccatctgtcttcatcttcccgccatctgatgagcagttgaaatctggaactgcctctgttgtgtgcctgctgaataacttctatcccagagaggccaaagtacagtggaaggtggataacgccctccaatcgggtaactcccaggagagtgtcacagagcaggacagcaaggacagcacctacagcctcagcagcaccctgacgctgagcaaagcagactacgagaaacacaaagtctacgcctgcgaagtcacccatcagggcctgagctcgcccgtcacaaagagcttcaacaggggagagtgt

SEQ ID NO: 200 - protein, 113 aa, Artificial Sequence
  source: /note="Description of Artificial Sequence: Synthetic polypeptide"
EIVLTQSPDFQSVTPKEKVTITCKSSQSLLDSGNQKNFLTWYQQKPGQAPRLLIYWASTRESGVPSRFSGSGSGTDFTFTISSLEAEDAATYYCQNDYSYPYTFGQGTKVEIK

SEQ ID NO: 201 - DNA, 339 bp, Artificial Sequence
  source: /note="Description of Artificial Sequence: Synthetic polynucleotide"
gaaattgtgctgactcagtctccagactttcagtctgtgactccaaaggagaaagtcaccatcacctgcaagtccagtcagagtctgttagacagtggaaatcaaaagaacttcttgacctggtaccagcagaaacctggccaggctcccaggctcctcatctattgggcatccactagggaatctggggtcccctcgaggttcagtggcagtggatctgggacagatttcacctttaccatcagtagcctggaagctgaagatgctgcaacatattactgtcagaatgattatagttatccgtacacgttcggccaagggaccaaggtggaaatcaaa

SEQ ID NO: 202 - protein, 220 aa, Artificial Sequence
  source: /note="Description of Artificial Sequence: Synthetic polypeptide"
EIVLTQSPDFQSVTPKEKVTITCKSSQSLLDSGNQKNFLTWYQQKPGQAPRLLIYWASTRESGVPSRFSGSGSGTDFTFTISSLEAEDAATYYCQNDYSYPYTFGQGTKVEIKRTVAAPSVFIFPPSDEQLKSGTASVVCLLNNFYPREAKVQWKVDNALQSGNSQESVTEQDSKDSTYSLSSTLTLSKADYEKHKVYACEVTHQGLSSPVTKSFNRGEC

SEQ ID NO: 203 - DNA, 660 bp, Artificial Sequence
  source: /note="Description of Artificial Sequence: Synthetic polynucleotide"
gaaattgtgctgactcagtctccagactttcagtctgtgactccaaaggagaaagtcaccatcacctgcaagtccagtcagagtctgttagacagtggaaatcaaaagaacttcttgacctggtaccagcagaaacctggccaggctcccaggctcctcatctattgggcatccactagggaatctggggtcccctcgaggttcagtggcagtggatctgggacagatttcacctttaccatcagtagcctggaagctgaagatgctgcaacatattactgtcagaatgattatagttatccgtacacgttcggccaagggaccaaggtggaaatcaaacgtacggtggctgcaccatctgtcttcatcttcccgccatctgatgagcagttgaaatctggaactgcctctgttgtgtgcctgctgaataacttctatcccagagaggccaaagtacagtggaaggtggataacgccctccaatcgggtaactcccaggagagtgtcacagagcaggacagcaaggacagcacctacagcctcagcagcaccctgacgctgagcaaagcagactacgagaaacacaaagtctacgcctgcgaagtcacccatcagggcctgagctcgcccgtcacaaagagcttcaacaggggagagtgt

SEQ ID NO: 204 - protein, 113 aa, Artificial Sequence
  source: /note="Description of Artificial Sequence: Synthetic polypeptide"
EIVLTQSPATLSLSPGERATLSCKSSQSLLDSGNQKNFLTWYQQKPGQAPRLLIYWASTRESGVPSRFSGSGSGTDFTFTISSLEAEDAATYYCQNDYSYPYTFGQGTKVEIK

SEQ ID NO: 205 - DNA, 339 bp, Artificial Sequence
  source: /note="Description of Artificial Sequence: Synthetic polynucleotide"
gaaattgtgttgacacagtctccagccaccctgtctttgtctccaggggaaagagccaccctctcctgcaagtccagtcagagtctgttagacagtggaaatcaaaagaacttcttgacctggtaccagcagaaacctggccaggctcccaggctcctcatctattgggcatccactagggaatctggggtcccctcgaggttcagtggcagtggatctgggacagatttcacctttaccatcagtagcctggaagctgaagatgctgcaacatattactgtcagaatgattatagttatccgtacacgttcggccaagggaccaaggtggaaatcaaa

SEQ ID NO: 206 - protein, 220 aa, Artificial Sequence
  source: /note="Description of Artificial Sequence: Synthetic polypeptide"
EIVLTQSPATLSLSPGERATLSCKSSQSLLDSGNQKNFLTWYQQKPGQAPRLLIYWASTRESGVPSRFSGSGSGTDFTFTISSLEAEDAATYYCQNDYSYPYTFGQGTKVEIKRTVAAPSVFIFPPSDEQLKSGTASVVCLLNNFYPREAKVQWKVDNALQSGNSQESVTEQDSKDSTYSLSSTLTLSKADYEKHKVYACEVTHQGLSSPVTKSFNRGEC

SEQ ID NO: 207 - DNA, 660 bp, Artificial Sequence
  source: /note="Description of Artificial Sequence: Synthetic polynucleotide"
gaaattgtgttgacacagtctccagccaccctgtctttgtctccaggggaaagagccaccctctcctgcaagtccagtcagagtctgttagacagtggaaatcaaaagaacttcttgacctggtaccagcagaaacctggccaggctcccaggctcctcatctattgggcatccactagggaatctggggtcccctcgaggttcagtggcagtggatctgggacagatttcacctttaccatcagtagcctggaagctgaagatgctgcaacatattactgtcagaatgattatagttatccgtacacgttcggccaagggaccaaggtggaaatcaaacgtacggtggctgcaccatctgtcttcatcttcccgccatctgatgagcagttgaaatctggaactgcctctgttgtgtgcctgctgaataacttctatcccagagaggccaaagtacagtggaaggtggataacgccctccaatcgggtaactcccaggagagtgtcacagagcaggacagcaaggacagcacctacagcctcagcagcaccctgacgctgagcaaagcagactacgagaaacacaaagtctacgcctgcgaagtcacccatcagggcctgagctcgcccgtcacaaagagcttcaacaggggagagtgt

SEQ ID NO: 208 - protein, 113 aa, Artificial Sequence
  source: /note="Description of Artificial Sequence: Synthetic polypeptide"
DIQMTQSPSSLSASVGDRVTITCKSSQSLLDSGNQKNFLTWYLQKPGQSPQLLIYWASTRESGVPSRFSGSGSGTDFTFTISSLEAEDAATYYCQNDYSYPYTFGQGTKVEIK

SEQ ID NO: 209 - DNA, 339 bp, Artificial Sequence
  source: /note="Description of Artificial Sequence: Synthetic polynucleotide"
gacatccagatgacccagtctccatcctccctgtctgcatctgtaggagacagagtcaccatcacttgcaagtccagtcagagtctgttagacagtggaaatcaaaagaacttcttgacctggtacctgcagaagccagggcagtctccacagctcctgatctattgggcatccactagggaatctggggtcccctcgaggttcagtggcagtggatctgggacagatttcacctttaccatcagtagcctggaagctgaagatgctgcaacatattactgtcagaatgattatagttatccgtacacgttcggccaagggaccaaggtggaaatcaaa

SEQ ID NO: 210 - protein, 220 aa, Artificial Sequence
  source: /note="Description of Artificial Sequence: Synthetic polypeptide"
DIQMTQSPSSLSASVGDRVTITCKSSQSLLDSGNQKNFLTWYLQKPGQSPQLLIYWASTRESGVPSRFSGSGSGTDFTFTISSLEAEDAATYYCQNDYSYPYTFGQGTKVEIKRTVAAPSVFIFPPSDEQLKSGTASVVCLLNNFYPREAKVQWKVDNALQSGNSQESVTEQDSKDSTYSLSSTLTLSKADYEKHKVYACEVTHQGLSSPVTKSFNRGEC

SEQ ID NO: 211 - DNA, 660 bp, Artificial Sequence
  source: /note="Description of Artificial Sequence: Synthetic polynucleotide"
gacatccagatgacccagtctccatcctccctgtctgcatctgtaggagacagagtcaccatcacttgcaagtccagtcagagtctgttagacagtggaaatcaaaagaacttcttgacctggtacctgcagaagccagggcagtctccacagctcctgatctattgggcatccactagggaatctggggtcccctcgaggttcagtggcagtggatctgggacagatttcacctttaccatcagtagcctggaagctgaagatgctgcaacatattactgtcagaatgattatagttatccgtacacgttcggccaagggaccaaggtggaaatcaaacgtacggtggctgcaccatctgtcttcatcttcccgccatctgatgagcagttgaaatctggaactgcctctgttgtgtgcctgctgaataacttctatcccagagaggccaaagtacagtggaaggtggataacgccctccaatcgggtaactcccaggagagtgtcacagagcaggacagcaaggacagcacctacagcctcagcagcaccctgacgctgagcaaagcagactacgagaaacacaaagtctacgcctgcgaagtcacccatcagggcctgagctcgcccgtcacaaagagcttcaacaggggagagtgt

SEQ ID NO: 212 - protein, 113 aa, Artificial Sequence
  source: /note="Description of Artificial Sequence: Synthetic polypeptide"
DVVMTQSPLSLPVTLGQPASISCKSSQSLLDSGNQKNFLTWYQQKPGKAPKLLIYWASTRESGVPSRFSGSGSGTDFTFTISSLEAEDAATYYCQNDYSYPYTFGQGTKVEIK

SEQ ID NO: 213 - DNA, 339 bp, Artificial Sequence
  source: /note="Description of Artificial Sequence: Synthetic polynucleotide"
gatgttgtgatgactcagtctccactctccctgcccgtcacccttggacagccggcctccatctcctgcaagtccagtcagagtctgttagacagtggaaatcaaaagaacttcttaacctggtatcagcagaaaccagggaaagctcctaagctcctgatctattgggcatccactagggaatctggggtcccctcgaggttcagtggcagtggatctgggacagatttcacctttaccatcagtagcctggaagctgaagatgctgcaacatattactgtcagaatgattatagttatccgtacacgttcggccaagggaccaaggtggaaatcaaa

SEQ ID NO: 214 - protein, 220 aa, Artificial Sequence
  source: /note="Description of Artificial Sequence: Synthetic polypeptide"
DVVMTQSPLSLPVTLGQPASISCKSSQSLLDSGNQKNFLTWYQQKPGKAPKLLIYWASTRESGVPSRFSGSGSGTDFTFTISSLEAEDAATYYCQNDYSYPYTFGQGTKVEIKRTVAAPSVFIFPPSDEQLKSGTASVVCLLNNFYPREAKVQWKVDNALQSGNSQESVTEQDSKDSTYSLSSTLTLSKADYEKHKVYACEVTHQGLSSPVTKSFNRGEC

SEQ ID NO: 215 - DNA, 660 bp, Artificial Sequence
  source: /note="Description of Artificial Sequence: Synthetic polynucleotide"
gatgttgtgatgactcagtctccactctccctgcccgtcacccttggacagccggcctccatctcctgcaagtccagtcagagtctgttagacagtggaaatcaaaagaacttcttaacctggtatcagcagaaaccagggaaagctcctaagctcctgatctattgggcatccactagggaatctggggtcccctcgaggttcagtggcagtggatctgggacagatttcacctttaccatcagtagcctggaagctgaagatgctgcaacatattactgtcagaatgattatagttatccgtacacgttcggccaagggaccaaggtggaaatcaaacgtacggtggctgcaccatctgtcttcatcttcccgccatctgatgagcagttgaaatctggaactgcctctgttgtgtgcctgctgaataacttctatcccagagaggccaaagtacagtggaaggtggataacgccctccaatcgggtaactcccaggagagtgtcacagagcaggacagcaaggacagcacctacagcctcagcagcaccctgacgctgagcaaagcagactacgagaaacacaaagtctacgcctgcgaagtcacccatcagggcctgagctcgcccgtcacaaagagcttcaacaggggagagtgt

SEQ ID NO: 216 - protein, 117 aa, Artificial Sequence
  source: /note="Description of Artificial Sequence: Synthetic polypeptide"
QVQLVQSGAEVKKPGASVKVSCKASGYTFTTYWMHWIRQSPSRGLEWLGNIYPGTGGSNFDEKFKNRFTISRDNSKNTLYLQMNSLRAEDTAVYYCTRWTTGTGAYWGQGTTVTVSS

SEQ ID NO: 217 - DNA, 351 bp, Artificial Sequence
  source: /note="Description of Artificial Sequence: Synthetic polynucleotide"
caggttcagctggtgcagtctggagctgaggtgaagaagcctggggcctcagtgaaggtctcctgcaaggcttctggctacacattcaccacttactggatgcactggatcaggcagtccccatcgagaggccttgagtggctgggtaatatttatcctggtactggtggttctaacttcgatgagaagttcaagaacagattcaccatctccagagacaattccaagaacacgctgtatcttcaaatgaacagcctgagagccgaggacacggccgtgtattactgtacaagatggactactgggacgggagcttactggggccagggcaccaccgtgaccgtgtcctcc

SEQ ID NO: 218 - protein, 444 aa, Artificial Sequence
  source: /note="Description of Artificial Sequence: Synthetic polypeptide"
QVQLVQSGAEVKKPGASVKVSCKASGYTFTTYWMHWIRQSPSRGLEWLGNIYPGTGGSNFDEKFKNRFTISRDNSKNTLYLQMNSLRAEDTAVYYCTRWTTGTGAYWGQGTTVTVSSASTKGPSVFPLAPCSRSTSESTAALGCLVKDYFPEPVTVSWNSGALTSGVHTFPAVLQSSGLYSLSSVVTVPSSSLGTKTYTCNVDHKPSNTKVDKRVESKYGPPCPPCPAPEFLGGPSVFLFPPKPKDTLMISRTPEVTCVVVDVSQEDPEVQFNWYVDGVEVHNAKTKPREEQFNSTYRVVSVLTVLHQDWLNGKEYKCKVSNKGLPSSIEKTISKAKGQPREPQVYTLPPSQEEMTKNQVSLTCLVKGFYPSDIAVEWESNGQPENNYKTTPPVLDSDGSFFLYSRLTVDKSRWQEGNVFSCSVMHEALHNHYTQKSLSLSLGK

SEQ ID NO: 219 - DNA, 1332 bp, Artificial Sequence
  source: /note="Description of Artificial Sequence: Synthetic polynucleotide"
caggttcagctggtgcagtctggagctgaggtgaagaagcctggggcctcagtgaaggtctcctgcaaggcttctggctacacattcaccacttactggatgcactggatcaggcagtccccatcgagaggccttgagtggctgggtaatatttatcctggtactggtggttctaacttcgatgagaagttcaagaacagattcaccatctccagagacaattccaagaacacgctgtatcttcaaatgaacagcctgagagccgaggacacggccgtgtattactgtacaagatggactactgggacgggagcttactggggccagggcaccaccgtgaccgtgtcctccgcttccaccaagggcccatccgtcttccccctggcgccctgctccaggagcacctccgagagcacagccgccctgggctgcctggtcaaggactacttccccgaaccggtgacggtgtcgtggaactcaggcgccctgaccagcggcgtgcacaccttcccggctgtcctacagtcctcaggactctactccctcagcagcgtggtgaccgtgccctccagcagcttgggcacgaagacctacacctgcaacgtagatcacaagcccagcaacaccaaggtggacaagagagttgagtccaaatatggtcccccatgcccaccgtgcccagcacctgagttcctggggggaccatcagtcttcctgttccccccaaaacccaaggacactctcatgatctcccggacccctgaggtcacgtgcgtggtggtggacgtgagccaggaagaccccgaggtccagttcaactggtacgtggatggcgtggaggtgcataatgccaagacaaagccgcgggaggagcagttcaacagcacgtaccgtgtggtcagcgtcctcaccgtcctgcaccaggactggctgaacggcaaggagtacaagtgcaaggtgtccaacaaaggcctcccgtcctccatcgagaaaaccatctccaaagccaaagggcagccccgagagccacaggtgtacaccctgcccccatcccaggaggagatgaccaagaaccaggtcagcctgacctgcctggtcaaaggcttctaccccagcgacatcgccgtggagtgggagagcaatgggcagccggagaacaactacaagaccacgcctcccgtgctggactccgacggctccttcttcctctacagcaggctaaccgtggacaagagcaggtggcaggaggggaatgtcttctcatgctccgtgatgcatgaggctctgcacaaccactacacacagaagagcctctccctgtctctgggtaaa

SEQ ID NO: 220 - protein, 117 aa, Artificial Sequence
  source: /note="Description of Artificial Sequence: Synthetic polypeptide"
EVQLVQSGAEVKKPGESLRISCKGSGYTFTTYWMHWVRQAPGQGLEWMGNIYPGTGGSNFDEKFKNRFTISRDNSKNTLYLQMNSLRAEDTAVYYCTRWTTGTGAYWGQGTTVTVSS

SEQ ID NO: 221 - DNA, 351 bp, Artificial Sequence
  source: /note="Description of Artificial Sequence: Synthetic polynucleotide"
gaagtgcagctggtgcagtctggagcagaggtgaaaaagcccggggagtctctgaggatctcctgtaagggttctggctacacattcaccacttactggatgcactgggtgcgacaggcccctggacaagggcttgagtggatgggtaatatttatcctggtactggtggttctaacttcgatgagaagttcaagaacagattcaccatctccagagacaattccaagaacacgctgtatcttcaaatgaacagcctgagagccgaggacacggccgtgtattactgtacaagatggactactgggacgggagcttattggggccagggcaccaccgtgaccgtgtcctcc

SEQ ID NO: 222 - protein, 444 aa, Artificial Sequence
  source: /note="Description of Artificial Sequence: Synthetic polypeptide"
EVQLVQSGAEVKKPGESLRISCKGSGYTFTTYWMHWVRQAPGQGLEWMGNIYPGTGGSNFDEKFKNRFTISRDNSKNTLYLQMNSLRAEDTAVYYCTRWTTGTGAYWGQGTTVTVSSASTKGPSVFPLAPCSRSTSESTAALGCLVKDYFPEPVTVSWNSGALTSGVHTFPAVLQSSGLYSLSSVVTVPSSSLGTKTYTCNVDHKPSNTKVDKRVESKYGPPCPPCPAPEFLGGPSVFLFPPKPKDTLMISRTPEVTCVVVDVSQEDPEVQFNWYVDGVEVHNAKTKPREEQFNSTYRVVSVLTVLHQDWLNGKEYKCKVSNKGLPSSIEKTISKAKGQPREPQVYTLPPSQEEMTKNQVSLTCLVKGFYPSDIAVEWESNGQPENNYKTTPPVLDSDGSFFLYSRLTVDKSRWQEGNVFSCSVMHEALHNHYTQKSLSLSLGK

SEQ ID NO: 223 - DNA, 1332 bp, Artificial Sequence
  source: /note="Description of Artificial Sequence: Synthetic polynucleotide"
gaagtgcagctggtgcagtctggagcagaggtgaaaaagcccggggagtctctgaggatctcctgtaagggttctggctacacattcaccacttactggatgcactgggtgcgacaggcccctggacaagggcttgagtggatgggtaatatttatcctggtactggtggttctaacttcgatgagaagttcaagaacagattcaccatctccagagacaattccaagaacacgctgtatcttcaaatgaacagcctgagagccgaggacacggccgtgtattactgtacaagatggactactgggacgggagcttattggggccagggcaccaccgtgaccgtgtcctccgcttccaccaagggcccatccgtcttccccctggcgccctgctccaggagcacctccgagagcacagccgccctgggctgcctggtcaaggactacttccccgaaccggtgacggtgtcgtggaactcaggcgccctgaccagcggcgtgcacaccttcccggctgtcctacagtcctcaggactctactccctcagcagcgtggtgaccgtgccctccagcagcttgggcacgaagacctacacctgcaacgtagatcacaagcccagcaacaccaaggtggacaagagagttgagtccaaatatggtcccccatgcccaccgtgcccagcacctgagttcctggggggaccatcagtcttcctgttccccccaaaacccaaggacactctcatgatctcccggacccctgaggtcacgtgcgtggtggtggacgtgagccaggaagaccccgaggtccagttcaactggtacgtggatggcgtggaggtgcataatgccaagacaaagccgcgggaggagcagttcaacagcacgtaccgtgtggtcagcgtcctcaccgtcctgcaccaggactggctgaacggcaaggagtacaagtgcaaggtgtccaacaaaggcctcccgtcctccatcgagaaaaccatctccaaagccaaagggcagccccgagagccacaggtgtacaccctgcccccatcccaggaggagatgaccaagaaccaggtcagcctgacctgcctggtcaaaggcttctaccccagcgacatcgccgtggagtgggagagcaatgggcagccggagaacaactacaagaccacgcctcccgtgctggactccgacggctccttcttcctctacagcaggctaaccgtggacaagagcaggtggcaggaggggaatgtcttctcatgctccgtgatgcatgaggctctgcacaaccactacacacagaagagcctctccctgtctctgggtaaa

SEQ ID NO: 224 - DNA, 351 bp, Artificial Sequence
  source: /note="Description of Artificial Sequence: Synthetic polynucleotide"
gaagtgcagctggtgcagtctggcgccgaagtgaagaagcctggcgagtccctgcggatctcctgcaagggctctggctacaccttcaccacctactggatgcactgggtgcgacaggctaccggccagggcctggaatggatgggcaacatctatcctggcaccggcggctccaacttcgacgagaagttcaagaacagagtgaccatcaccgccgacaagtccacctccaccgcctacatggaactgtcctccctgagatccgaggacaccgccgtgtactactgcacccggtggacaaccggcacaggcgcttattggggccagggcaccacagtgaccgtgtcctct

SEQ ID NO: 225 - protein, 443 aa, Artificial Sequence
  source: /note="Description of Artificial Sequence: Synthetic polypeptide"
EVQLVQSGAEVKKPGESLRISCKGSGYTFTTYWMHWVRQATGQGLEWMGNIYPGTGGSNFDEKFKNRVTITADKSTSTAYMELSSLRSEDTAVYYCTRWTTGTGAYWGQGTTVTVSSASTKGPSVFPLAPCSRSTSESTAALGCLVKDYFPEPVTVSWNSGALTSGVHTFPAVLQSSGLYSLSSVVTVPSSSLGTKTYTCNVDHKPSNTKVDKRVESKYGPPCPPCPAPEFLGGPSVFLFPPKPKDTLMISRTPEVTCVVVDVSQEDPEVQFNWYVDGVEVHNAKTKPREEQFNSTYRVVSVLTVLHQDWLNGKEYKCKVSNKGLPSSIEKTISKAKGQPREPQVYTLPPSQEEMTKNQVSLTCLVKGFYPSDIAVEWESNGQPENNYKTTPPVLDSDGSFFLYSRLTVDKSRWQEGNVFSCSVMHEALHNHYTQKSLSLSLG

SEQ ID NO: 226 - DNA, 1329 bp, Artificial Sequence
  source: /note="Description of Artificial Sequence: Synthetic polynucleotide"
gaagtgcagctggtgcagtctggcgccgaagtgaagaagcctggcgagtccctgcggatctcctgcaagggctctggctacaccttcaccacctactggatgcactgggtgcgacaggctaccggccagggcctggaatggatgggcaacatctatcctggcaccggcggctccaacttcgacgagaagttcaagaacagagtgaccatcaccgccgacaagtccacctccaccgcctacatggaactgtcctccctgagatccgaggacaccgccgtgtactactgcacccggtggacaaccggcacaggcgcttattggggccagggcaccacagtgaccgtgtcctctgcttctaccaaggggcccagcgtgttccccctggccccctgctccagaagcaccagcgagagcacagccgccctgggctgcctggtgaaggactacttccccgagcccgtgaccgtgtcctggaacagcggagccctgaccagcggcgtgcacaccttccccgccgtgctgcagagcagcggcctgtacagcctgagcagcgtggtgaccgtgcccagcagcagcctgggcaccaagacctacacctgtaacgtggaccacaagcccagcaacaccaaggtggacaagagggtggagagcaagtacggcccaccctgccccccctgcccagcccccgagttcctgggcggacccagcgtgttcctgttcccccccaagcccaaggacaccctgatgatcagcagaacccccgaggtgacctgtgtggtggtggacgtgtcccaggaggaccccgaggtccagttcaactggtacgtggacggcgtggaggtgcacaacgccaagaccaagcccagagaggagcagtttaacagcacctaccgggtggtgtccgtgctgaccgtgctgcaccaggactggctgaacggcaaagagtacaagtgtaaggtctccaacaagggcctgccaagcagcatcgaaaagaccatcagcaaggccaagggccagcctagagagccccaggtctacaccctgccacccagccaagaggagatgaccaagaaccaggtgtccctgacctgtctggtgaagggcttctacccaagcgacatcgccgtggagtgggagagcaacggccagcccgagaacaactacaagaccacccccccagtgctggacagcgacggcagcttcttcctgtacagcaggctgaccgtggacaagtccagatggcaggagggcaacgtctttagctgctccgtgatgcacgaggccctgcacaaccactacacccagaagagcctgagcctgtccctgggc

SEQ ID NO: 227 - DNA, 339 bp, Artificial Sequence
  source: /note="Description of Artificial Sequence: Synthetic polynucleotide"
gagatcgtgctgacccagtcccctgccaccctgtcactgtctccaggcgagagagctaccctgtcctgcaagtcctcccagtccctgctggactccggcaaccagaagaacttcctgacctggtatcagcagaagcccggccaggcccccagactgctgatctactgggcctccacccgggaatctggcgtgccctctagattctccggctccggctctggcaccgagtttaccctgaccatctccagcctgcagcccgacgacttcgccacctactactgccagaacgactactcctacccctacaccttcggccagggcaccaaggtggaaatcaag

SEQ ID NO: 228 - DNA, 660 bp, Artificial Sequence
  source: /note="Description of Artificial Sequence: Synthetic polynucleotide"
gagatcgtgctgacccagtcccctgccaccctgtcactgtctccaggcgagagagctaccctgtcctgcaagtcctcccagtccctgctggactccggcaaccagaagaacttcctgacctggtatcagcagaagcccggccaggcccccagactgctgatctactgggcctccacccgggaatctggcgtgccctctagattctccggctccggctctggcaccgagtttaccctgaccatctccagcctgcagcccgacgacttcgccacctactactgccagaacgactactcctacccctacaccttcggccagggcaccaaggtggaaatcaagcgtacggtggccgctcccagcgtgttcatcttccccccaagcgacgagcagctgaagagcggcaccgccagcgtggtgtgtctgctgaacaacttctaccccagggaggccaaggtgcagtggaaggtggacaacgccctgcagagcggcaacagccaggagagcgtcaccgagcaggacagcaaggactccacctacagcctgagcagcaccctgaccctgagcaaggccgactacgagaagcacaaggtgtacgcctgtgaggtgacccaccagggcctgtccagccccgtgaccaagagcttcaacaggggcgagtgc

SEQ ID NO: 229 - DNA, 351 bp, Artificial Sequence
  source: /note="Description of Artificial Sequence: Synthetic polynucleotide"
gaggtgcagctggtgcagtcaggcgccgaagtgaagaagcccggcgagtcactgagaattagctgtaaaggttcaggctacaccttcactacctactggatgcactgggtccgccaggctaccggtcaaggcctcgagtggatgggtaatatctaccccggcaccggcggctctaacttcgacgagaagtttaagaatagagtgactatcaccgccgataagtctactagcaccgcctatatggaactgtctagcctgagatcagaggacaccgccgtctactactgcactaggtggactaccggcacaggcgcctactggggtcaaggcactaccgtgaccgtgtctagc

SEQ ID NO: 230 - DNA, 1329 bp, Artificial Sequence
  source: /note="Description of Artificial Sequence: Synthetic polynucleotide"
gaggtgcagctggtgcagtcaggcgccgaagtgaagaagcccggcgagtcactgagaattagctgtaaaggttcaggctacaccttcactacctactggatgcactgggtccgccaggctaccggtcaaggcctcgagtggatgggtaatatctaccccggcaccggcggctctaacttcgacgagaagtttaagaatagagtgactatcaccgccgataagtctactagcaccgcctatatggaactgtctagcctgagatcagaggacaccgccgtctactactgcactaggtggactaccggcacaggcgcctactggggtcaaggcactaccgtgaccgtgtctagcgctagcactaagggcccgtccgtgttccccctggcaccttgtagccggagcactagcgaatccaccgctgccctcggctgcctggtcaaggattacttcccggagcccgtgaccgtgtcctggaacagcggagccctgacctccggagtgcacaccttccccgctgtgctgcagagctccgggctgtactcgctgtcgtcggtggtcacggtgccttcatctagcctgggtaccaagacctacacttgcaacgtggaccacaagccttccaacactaaggtggacaagcgcgtcgaatcgaagtacggcccaccgtgcccgccttgtcccgcgccggagttcctcggcggtccctcggtctttctgttcccaccgaagcccaaggacactttgatgatttcccgcacccctgaagtgacatgcgtggtcgtggacgtgtcacaggaagatccggaggtgcagttcaattggtacgtggatggcgtcgaggtgcacaacgccaaaaccaagccgagggaggagcagttcaactccacttaccgcgtcgtgtccgtgctgacggtgctgcatcaggactggctgaacgggaaggagtacaagtgcaaagtgtccaacaagggacttcctagctcaatcgaaaagaccatctcgaaagccaagggacagccccgggaaccccaagtgtataccctgccaccgagccaggaagaaatgactaagaaccaagtctcattgacttgccttgtgaagggcttctacccatcggatatcgccgtggaatgggagtccaacggccagccggaaaacaactacaagaccacccctccggtgctggactcagacggatccttcttcctctactcgcggctgaccgtggataagagcagatggcaggagggaaatgtgttcagctgttctgtgatgcatgaagccctgcacaaccactacactcagaagtccctgtccctctccctggga

SEQ ID NO: 231 - DNA, 339 bp, Artificial Sequence
  source: /note="Description of Artificial Sequence: Synthetic polynucleotide"
gagatcgtcctgactcagtcacccgctaccctgagcctgagccctggcgagcgggctacactgagctgtaaatctagtcagtcactgctggatagcggtaatcagaagaacttcctgacctggtatcagcagaagcccggtaaagcccctaagctgctgatctactgggcctctactagagaatcaggcgtgccctctaggtttagcggtagcggtagtggcaccgacttcaccttcactatctctagcctgcagcccgaggatatcgctacctactactgtcagaacgactatagctacccctacaccttcggtcaaggcactaaggtcgagattaag

SEQ ID NO: 232 - DNA, 660 bp, Artificial Sequence
  source: /note="Description of Artificial Sequence: Synthetic polynucleotide"
gagatcgtcctgactcagtcacccgctaccctgagcctgagccctggcgagcgggctacactgagctgtaaatctagtcagtcactgctggatagcggtaatcagaagaacttcctgacctggtatcagcagaagcccggtaaagcccctaagctgctgatctactgggcctctactagagaatcaggcgtgccctctaggtttagcggtagcggtagtggcaccgacttcaccttcactatctctagcctgcagcccgaggatatcgctacctactactgtcagaacgactatagctacccctacaccttcggtcaaggcactaaggtcgagattaagcgtacggtggccgctcccagcgtgttcatcttcccccccagcgacgagcagctgaagagcggcaccgccagcgtggtgtgcctgctgaacaacttctacccccgggaggccaaggtgcagtggaaggtggacaacgccctgcagagcggcaacagccaggagagcgtcaccgagcaggacagcaaggactccacctacagcctgagcagcaccctgaccctgagcaaggccgactacgagaagcataaggtgtacgcctgcgaggtgacccaccagggcctgtccagccccgtgaccaagagcttcaacaggggcgagtgc

SEQ ID NO: 233 - DNA, 339 bp, Artificial Sequence
  source: /note="Description of Artificial Sequence: Synthetic polynucleotide"
gagatcgtgctgacccagtcccccgacttccagtccgtgacccccaaagaaaaagtgaccatcacatgcaagtcctcccagtccctgctggactccggcaaccagaagaacttcctgacctggtatcagcagaagcccggccaggcccccagactgctgatctactgggcctccacccgggaatctggcgtgccctctagattctccggctccggctctggcaccgactttaccttcaccatctccagcctggaagccgaggacgccgccacctactactgccagaacgactactcctacccctacaccttcggccagggcaccaaggtggaaatcaag

SEQ ID NO: 234 - DNA, 660 bp, Artificial Sequence
  source: /note="Description of Artificial Sequence: Synthetic polynucleotide"
gagatcgtgctgacccagtcccccgacttccagtccgtgacccccaaagaaaaagtgaccatcacatgcaagtcctcccagtccctgctggactccggcaaccagaagaacttcctgacctggtatcagcagaagcccggccaggcccccagactgctgatctactgggcctccacccgggaatctggcgtgccctctagattctccggctccggctctggcaccgactttaccttcaccatctccagcctggaagccgaggacgccgccacctactactgccagaacgactactcctacccctacaccttcggccagggcaccaaggtggaaatcaagcgtacggtggccgctcccagcgtgttcatcttccccccaagcgacgagcagctgaagagcggcaccgccagcgtggtgtgtctgctgaacaacttctaccccagggaggccaaggtgcagtggaaggtggacaacgccctgcagagcggcaacagccaggagagcgtcaccgagcaggacagcaaggactccacctacagcctgagcagcaccctgaccctgagcaaggccgactacgagaagcacaaggtgtacgcctgtgaggtgacccaccagggcctgtccagccccgtgaccaagagcttcaacaggggcgagtgc

SEQ ID NO: 235 - DNA, 351 bp, Artificial Sequence
  source: /note="Description of Artificial Sequence: Synthetic polynucleotide"
gaagtgcagctggtgcagtctggcgccgaagtgaagaagcctggcgagtccctgcggatctcctgcaagggctctggctacaccttcaccacctactggatgcactggatccggcagtccccctctaggggcctggaatggctgggcaacatctaccctggcaccggcggctccaacttcgacgagaagttcaagaacaggttcaccatctcccgggacaactccaagaacaccctgtacctgcagatgaactccctgcgggccgaggacaccgccgtgtactactgtaccagatggaccaccggaaccggcgcctattggggccagggcacaacagtgaccgtgtcctcc

SEQ ID NO: 236 - protein, 443 aa, Artificial Sequence
  source: /note="Description of Artificial Sequence: Synthetic polypeptide"
EVQLVQSGAEVKKPGESLRISCKGSGYTFTTYWMHWIRQSPSRGLEWLGNIYPGTGGSNFDEKFKNRFTISRDNSKNTLYLQMNSLRAEDTAVYYCTRWTTGTGAYWGQGTTVTVSSASTKGPSVFPLAPCSRSTSESTAALGCLVKDYFPEPVTVSWNSGALTSGVHTFPAVLQSSGLYSLSSVVTVPSSSLGTKTYTCNVDHKPSNTKVDKRVESKYGPPCPPCPAPEFLGGPSVFLFPPKPKDTLMISRTPEVTCVVVDVSQEDPEVQFNWYVDGVEVHNAKTKPREEQFNSTYRVVSVLTVLHQDWLNGKEYKCKVSNKGLPSSIEKTISKAKGQPREPQVYTLPPSQEEMTKNQVSLTCLVKGFYPSDIAVEWESNGQPENNYKTTPPVLDSDGSFFLYSRLTVDKSRWQEGNVFSCSVMHEALHNHYTQKSLSLSLG

SEQ ID NO: 237 - DNA, 1329 bp, Artificial Sequence
  source: /note="Description of Artificial Sequence: Synthetic polynucleotide"
gaagtgcagctggtgcagtctggcgccgaagtgaagaagcctggcgagtccctgcggatctcctgcaagggctctggctacaccttcaccacctactggatgcactggatccggcagtccccctctaggggcctggaatggctgggcaacatctaccctggcaccggcggctccaacttcgacgagaagttcaagaacaggttcaccatctcccgggacaactccaagaacaccctgtacctgcagatgaactccctgcgggccgaggacaccgccgtgtactactgtaccagatggaccaccggaaccggcgcctattggggccagggcacaacagtgaccgtgtcctccgcttctaccaaggggcccagcgtgttccccctggccccctgctccagaagcaccagcgagagcacagccgccctgggctgcctggtgaaggactacttccccgagcccgtgaccgtgtcctggaacagcggagccctgaccagcggcgtgcacaccttccccgccgtgctgcagagcagcggcctgtacagcctgagcagcgtggtgaccgtgcccagcagcagcctgggcaccaagacctacacctgtaacgtggaccacaagcccagcaacaccaaggtggacaagagggtggagagcaagtacggcccaccctgccccccctgcccagcccccgagttcctgggcggacccagcgtgttcctgttcccccccaagcccaaggacaccctgatgatcagcagaacccccgaggtgacctgtgtggtggtggacgtgtcccaggaggaccccgaggtccagttcaactggtacgtggacggcgtggaggtgcacaacgccaagaccaagcccagagaggagcagtttaacagcacctaccgggtggtgtccgtgctgaccgtgctgcaccaggactggctgaacggcaaagagtacaagtgtaaggtctccaacaagggcctgccaagcagcatcgaaaagaccatcagcaaggccaagggccagcctagagagccccaggtctacaccctgccacccagccaagaggagatgaccaagaaccaggtgtccctgacctgtctggtgaagggcttctacccaagcgacatcgccgtggagtgggagagcaacggccagcccgagaacaactacaagaccacccccccagtgctggacagcgacggcagcttcttcctgtacagcaggctgaccgtggacaagtccagatggcaggagggcaacgtctttagctgctccgtgatgcacgaggccctgcacaaccactacacccagaagagcctgagcctgtccctgggc

SEQ ID NO: 238 - DNA, 339 bp, Artificial Sequence
  source: /note="Description of Artificial Sequence: Synthetic polynucleotide"
gagatcgtgctgacccagtcccctgccaccctgtcactgtctccaggcgagagagctaccctgtcctgcaagtcctcccagtccctgctggactccggcaaccagaagaacttcctgacctggtatcagcagaagcccggccaggcccccagactgctgatctactgggcctccacccgggaatctggcgtgccctctagattctccggctccggctctggcaccgactttaccttcaccatctccagcctggaagccgaggacgccgccacctactactgccagaacgactactcctacccctacaccttcggccagggcaccaaggtggaaatcaag

SEQ ID NO: 239 - DNA, 660 bp, Artificial Sequence
  source: /note="Description of Artificial Sequence: Synthetic polynucleotide"
gagatcgtgctgacccagtcccctgccaccctgtcactgtctccaggcgagagagctaccctgtcctgcaagtcctcccagtccctgctggactccggcaaccagaagaacttcctgacctggtatcagcagaagcccggccaggcccccagactgctgatctactgggcctccacccgggaatctggcgtgccctctagattctccggctccggctctggcaccgactttaccttcaccatctccagcctggaagccgaggacgccgccacctactactgccagaacgactactcctacccctacaccttcggccagggcaccaaggtggaaatcaagcgtacggtggccgctcccagcgtgttcatcttccccccaagcgacgagcagctgaagagcggcaccgccagcgtggtgtgtctgctgaacaacttctaccccagggaggccaaggtgcagtggaaggtggacaacgccctgcagagcggcaacagccaggagagcgtcaccgagcaggacagcaaggactccacctacagcctgagcagcaccctgaccctgagcaaggccgactacgagaagcacaaggtgtacgcctgtgaggtgacccaccagggcctgtccagccccgtgaccaagagcttcaacaggggcgagtgc

SEQ ID NO: 240 - DNA, 339 bp, Artificial Sequence
  source: /note="Description of Artificial Sequence: Synthetic polynucleotide"
gagatcgtcctgactcagtcacccgctaccctgagcctgagccctggcgagcgggctacactgagctgtaaatctagtcagtcactgctggatagcggtaatcagaagaacttcctgacctggtatcagcagaagcccggtcaagcccctagactgctgatctactgggcctctactagagaatcaggcgtgccctctaggtttagcggtagcggtagtggcaccgacttcaccttcactatctctagcctggaagccgaggacgccgctacctactactgtcagaacgactatagctacccctacaccttcggtcaaggcactaaggtcgagattaag

SEQ ID NO: 241 - DNA, 660 bp, Artificial Sequence
  source: /note="Description of Artificial Sequence: Synthetic polynucleotide"
gagatcgtcctgactcagtcacccgctaccctgagcctgagccctggcgagcgggctacactgagctgtaaatctagtcagtcactgctggatagcggtaatcagaagaacttcctgacctggtatcagcagaagcccggtcaagcccctagactgctgatctactgggcctctactagagaatcaggcgtgccctctaggtttagcggtagcggtagtggcaccgacttcaccttcactatctctagcctggaagccgaggacgccgctacctactactgtcagaacgactatagctacccctacaccttcggtcaaggcactaaggtcgagattaagcgtacggtggccgctcccagcgtgttcatcttcccccccagcgacgagcagctgaagagcggcaccgccagcgtggtgtgcctgctgaacaacttctacccccgggaggccaaggtgcagtggaaggtggacaacgccctgcagagcggcaacagccaggagagcgtcaccgagcaggacagcaaggactccacctacagcctgagcagcaccctgaccctgagcaaggccgactacgagaagcataaggtgtacgcctgcgaggtgacccaccagggcctgtccagccccgtgaccaagagcttcaacaggggcgagtgc

SEQ ID NO: 242 - DNA, 15 bp, Artificial Sequence
  source: /note="Description of Artificial Sequence: Synthetic oligonucleotide"
acttactggatgcac

SEQ ID NO: 243 - DNA, 51 bp, Artificial Sequence
  source: /note="Description of Artificial Sequence: Synthetic oligonucleotide"
aatatttatcctggtactggtggttctaacttcgatgagaagttcaagaac

SEQ ID NO: 244 - DNA, 24 bp, Artificial Sequence
  source: /note="Description of Artificial Sequence: Synthetic oligonucleotide"
tggactactgggacgggagcttat

SEQ ID NO: 245 - DNA, 21 bp, Artificial Sequence
  source: /note="Description of Artificial Sequence: Synthetic oligonucleotide"
ggctacacattcaccacttac

SEQ ID NO: 246 - DNA, 18 bp, Artificial Sequence
  source: /note="Description of Artificial Sequence: Synthetic oligonucleotide"
tatcctggtactggtggt

SEQ ID NO: 247 - DNA, 51 bp, Artificial Sequence
  source: /note="Description of Artificial Sequence: Synthetic oligonucleotide"
aagtccagtcagagtctgttagacagtggaaatcaaaagaacttcttgacc

SEQ ID NO: 248 - DNA, 21 bp, Artificial Sequence
  source: /note="Description of Artificial Sequence: Synthetic oligonucleotide"
tgggcatccactagggaatct

SEQ ID NO: 249 - DNA, 27 bp, Artificial Sequence
  source: /note="Description of Artificial Sequence: Synthetic oligonucleotide"
cagaatgattatagttatccgtgcacg

SEQ ID NO: 250 - DNA, 39 bp, Artificial Sequence
  source: /note="Description of Artificial Sequence: Synthetic oligonucleotide"
agtcagagtctgttagacagtggaaatcaaaagaacttc

SEQ ID NO: 251 - DNA, 9 bp, Artificial Sequence
  source: /note="Description of Artificial Sequence: Synthetic oligonucleotide"
tgggcatcc

SEQ ID NO: 252 - DNA, 18 bp, Artificial Sequence
  source: /note="Description of Artificial Sequence: Synthetic oligonucleotide"
gattatagttatccgtgc

SEQ ID NO: 253 - DNA, 27 bp, Artificial Sequence
  source: /note="Description of Artificial Sequence: Synthetic oligonucleotide"
cagaatgattatagttatccgtacacg

SEQ ID NO: 254 - DNA, 18 bp, Artificial Sequence
  source: /note="Description of Artificial Sequence: Synthetic oligonucleotide"
gattatagttatccgtac

SEQ ID NO: 255 - DNA, 24 bp, Artificial Sequence
  source: /note="Description of Artificial Sequence: Synthetic oligonucleotide"
tggactactgggacgggagcttac

SEQ ID NO: 256 - DNA, 15 bp, Artificial Sequence
  source: /note="Description of Artificial Sequence: Synthetic oligonucleotide"
acctactggatgcac

SEQ ID NO: 257 - DNA, 51 bp, Artificial Sequence
  source: /note="Description of Artificial Sequence: Synthetic oligonucleotide"
aacatctatcctggcaccggcggctccaacttcgacgagaagttcaagaac

SEQ ID NO: 258 - DNA, 24 bp, Artificial Sequence
  source: /note="Description of Artificial Sequence: Synthetic oligonucleotide"
tggacaaccggcacaggcgcttat

SEQ ID NO: 259 - DNA, 21 bp, Artificial Sequence
  source: /note="Description of Artificial Sequence: Synthetic oligonucleotide"
ggctacaccttcaccacctac

SEQ ID NO: 260 - DNA, 18 bp, Artificial Sequence
  source: /note="Description of Artificial Sequence: Synthetic oligonucleotide"
tatcctggcaccggcggc

SEQ ID NO: 261 - DNA, 51 bp, Artificial Sequence
  source: /note="Description of Artificial Sequence: Synthetic oligonucleotide"
aagtcctcccagtccctgctggactccggcaaccagaagaacttcctgacc

SEQ ID NO: 262 - DNA, 21 bp, Artificial Sequence
  source: /note="Description of Artificial Sequence: Synthetic oligonucleotide"
tgggcctccacccgggaatct

SEQ ID NO: 263 - DNA, 27 bp, Artificial Sequence
  source: /note="Description of Artificial Sequence: Synthetic oligonucleotide"
cagaacgactactcctacccctacacc

SEQ ID NO: 264 - DNA, 39 bp, Artificial Sequence
  source: /note="Description of Artificial Sequence: Synthetic oligonucleotide"
tcccagtccctgctggactccggcaaccagaagaacttc

SEQ ID NO: 265 - DNA, 9 bp, Artificial Sequence
  source: /note="Description of Artificial Sequence: Synthetic oligonucleotide"
tgggcctcc

SEQ ID NO: 266 - DNA, 18 bp, Artificial Sequence
  source: /note="Description of Artificial Sequence: Synthetic oligonucleotide"
gactactcctacccctac

SEQ ID NO: 267 - DNA, 15 bp, Artificial Sequence
  source: /note="Description of Artificial Sequence: Synthetic oligonucleotide"
acctactggatgcac

SEQ ID NO: 268 - DNA, 51 bp, Artificial Sequence
  source: /note="Description of Artificial Sequence: Synthetic oligonucleotide"
aatatctaccccggcaccggcggctctaacttcgacgagaagtttaagaat

SEQ ID NO: 269 - DNA, 24 bp, Artificial Sequence
  source: /note="Description of Artificial Sequence: Synthetic oligonucleotide"
tggactaccggcacaggcgcctac

SEQ ID NO: 270 - DNA, 21 bp, Artificial Sequence
  source: /note="Description of Artificial Sequence: Synthetic oligonucleotide"
ggctacaccttcactacctac

SEQ ID NO: 271 - DNA, 18 bp, Artificial Sequence
  source: /note="Description of Artificial Sequence: Synthetic oligonucleotide"
taccccggcaccggcggc

SEQ ID NO: 272 - DNA, 51 bp, Artificial Sequence
  source: /note="Description of Artificial Sequence: Synthetic oligonucleotide"
aaatctagtcagtcactgctggatagcggtaatcagaagaacttcctgacc

SEQ ID NO: 273 - DNA, 21 bp, Artificial Sequence
  source: /note="Description of Artificial Sequence: Synthetic oligonucleotide"
tgggcctctactagagaatca

SEQ ID NO: 274 - DNA, 27 bp, Artificial Sequence
  source: /note="Description of Artificial Sequence: Synthetic oligonucleotide"
cagaacgactatagctacccctacacc

SEQ ID NO: 275 - DNA, 39 bp, Artificial Sequence
  source: /note="Description of Artificial Sequence: Synthetic oligonucleotide"
agtcagtcactgctggatagcggtaatcagaagaacttc

SEQ ID NO: 276 - DNA, 9 bp, Artificial Sequence
  source: /note="Description of Artificial Sequence: Synthetic oligonucleotide"
tgggcctct

SEQ ID NO: 277 - DNA, 18 bp, Artificial Sequence
  source: /note="Description of Artificial Sequence: Synthetic oligonucleotide"
gactatagctacccctac

SEQ ID NO: 278 - DNA, 51 bp, Artificial Sequence
  source: /note="Description of Artificial Sequence: Synthetic oligonucleotide"
aacatctaccctggcaccggcggctccaacttcgacgagaagttcaagaac

SEQ ID NO: 279 - DNA, 24 bp, Artificial Sequence
  source: /note="Description of Artificial Sequence: Synthetic oligonucleotide"
tggaccaccggaaccggcgcctat

SEQ ID NO: 280 - DNA, 18 bp, Artificial Sequence
  source: /note="Description of Artificial Sequence: Synthetic oligonucleotide"
taccctggcaccggcggc

SEQ ID NO: 281 - protein, 440 aa, Artificial Sequence
  source: /note="Description of Artificial Sequence: Synthetic polypeptide"
QVQLVESGGGVVQPGRSLRLDCKASGITFSNSGMHWVRQAPGKGLEWVAVIWYDGSKRYYADSVKGRFTISRDNSKNTLFLQMNSLRAEDTAVYYCATNDDYWGQGTLVTVSSASTKGPSVFPLAPCSRSTSESTAALGCLVKDYFPEPVTVSWNSGALTSGVHTFPAVLQSSGLYSLSSVVTVPSSSLGTKTYTCNVDHKPSNTKVDKRVESKYGPPCPPCPAPEFLGGPSVFLFPPKPKDTLMISRTPEVTCVVVDVSQEDPEVQFNWYVDGVEVHNAKTKPREEQFNSTYRVVSVLTVLHQDWLNGKEYKCKVSNKGLPSSIEKTISKAKGQPREPQVYTLPPSQEEMTKNQVSLTCLVKGFYPSDIAVEWESNGQPENNYKTTPPVLDSDGSFFLYSRLTVDKSRWQEGNVFSCSVMHEALHNHYTQKSLSLSLGK

SEQ ID NO: 282 - protein, 214 aa, Artificial Sequence
  source: /note="Description of Artificial Sequence: Synthetic polypeptide"
EIVLTQSPATLSLSPGERATLSCRASQSVSSYLAWYQQKPGQAPRLLIYDASNRATGIPARFSGSGSGTDFTLTISSLEPEDFAVYYCQQSSNWPRTFGQGTKVEIKRTVAAPSVFIFPPSDEQLKSGTASVVCLLNNFYPREAKVQWKVDNALQSGNSQESVTEQDSKDSTYSLSSTLTLSKADYEKHKVYACEVTHQGLSSPVTKSFNRGEC

SEQ ID NO: 283 - protein, 447 aa, Artificial Sequence
  source: /note="Description of Artificial Sequence: Synthetic polypeptide"
QVQLVQSGVEVKKPGASVKVSCKASGYTFTNYYMYWVRQAPGQGLEWMGGINPSNGGTNFNEKFKNRVTLTTDSSTTTAYMELKSLQFDDTAVYYCARRDYRFDMGFDYWGQGTTVTVSSASTKGPSVFPLAPCSRSTSESTAALGCLVKDYFPEPVTVSWNSGALTSGVHTFPAVLQSSGLYSLSSVVTVPSSSLGTKTYTCNVDHKPSNTKVDKRVESKYGPPCPPCPAPEFLGGPSVFLFPPKPKDTLMISRTPEVTCVVVDVSQEDPEVQFNWYVDGVEVHNAKTKPREEQFNSTYRVVSVLTVLHQDWLNGKEYKCKVSNKGLPSSIEKTISKAKGQPREPQVYTLPPSQEEMTKNQVSLTCLVKGFYPSDIAVEWESNGQPENNYKTTPPVLDSDGSFFLYSRLTVDKSRWQEGNVFSCSVMHEALHNHYTQKSLSLSLGK

SEQ ID NO: 284 - protein, 218 aa, Artificial Sequence
  source: /note="Description of Artificial Sequence: Synthetic polypeptide"
EIVLTQSPATLSLSPGERATLSCRASKGVSTSGYSYLHWYQQKPGQAPRLLIYLASYLESGVPARFSGSGSGTDFTLTISSLEPEDFAVYYCQHSRDLPLTFGGGTKVEIKRTVAAPSVFIFPPSDEQLKSGTASVVCLLNNFYPREAKVQWKVDNALQSGNSQESVTEQDSKDSTYSLSSTLTLSKADYEKHKVYACEVTHQGLSSPVTKSFNRGEC

SEQ ID NO: 285 - DNA, 51 bp, Artificial Sequence
  source: /note="Description of Artificial Sequence: Synthetic oligonucleotide"
aagtccagtcagagtctgttagacagtggaaatcaaaagaacttcttaacc

SEQ ID NO: 286 - protein, 10 aa, Artificial Sequence
  source: /note="Description of Artificial Sequence: Synthetic peptide"
GYTFTTYWMH

SEQ ID NO: 287 - protein, 119 aa, Artificial Sequence
  source: /note="Description of Artificial Sequence: Synthetic polypeptide"
QVQLLESGAELVRPGSSVKISCKASGYAFSSYWMNWVKQRPGQGLEWIGQIYPGDGDTNYNGKFKGQATLTADKSSSTAYMQLSGLTSEDSAVYSCARKTISSVVDFYFDYWGQGTTVT

SEQ ID NO: 288 - protein, 111 aa, Artificial Sequence
  source: /note="Description of Artificial Sequence: Synthetic polypeptide"
ELVLTQSPKFMSTSVGDRVSVTCKASQNVGTNVAWYQQKPGQSPKPLIYSATYRNSGVPDRFTGSGSGTDFTLTITNVQSKDLADYFYFCQYNRYPYTSGGGTKLEIKRRS

SEQ ID NO: 289 - protein, 465 aa, Artificial Sequence
  source: /note="Description of Artificial Sequence: Synthetic polypeptide"
DIQMTQTTSSLSASLGDRVTISCRASQDISKYLNWYQQKPDGTVKLLIYHTSRLHSGVPSRFSGSGSGTDYSLTISNLEQEDIATYFCQQGNTLPYTFGGGTKLEITGGGGSGGGGSGGGGSEVKLQESGPGLVAPSQSLSVTCTVSGVSLPDYGVSWIRQPPRKGLEWLGVIWGSETTYYNSALKSRLTIIKDNSKSQVFLKMNSLQTDDTAIYYCAKHYYYGGSYAMDYWGQGTSVTVSSTTTPAPRPPTPAPTIASQPLSLRPEACRPAAGGAVHTRGLDFACDIYIWAPLAGTCGVLLLSLVITLYCKRGRKKLLYIFKQPFMRPVQTTQEEDGCSCRFPEEEEGGCELRVKFSRSADAPAYKQGQNQLYNELNLGRREEYDVLDKRRGRDPEMGGKPRRKNPQEGLYNELQKDKMAEAYSEIGMKGERRRGKGHDGLYQGLSTATKDTYDALHMQALPPR

SEQ ID NO: 290 - DNA, 63 bp, Artificial Sequence
  source: /note="Description of Artificial Sequence: Synthetic oligonucleotide"
atggccctccctgtcaccgccctgctgcttccgctggctcttctgctccacgccgctcggccc

SEQ ID NO: 291 - DNA, 72 bp, Artificial Sequence
  source: /note="Description of Artificial Sequence: Synthetic oligonucleotide"
atctacatttgggcccctctggctggtacttgcggggtcctgctgctttcactcgtgatcactctttactgt

SEQ ID NO: 292 - DNA, 126 bp, Artificial Sequence
  source: /note="Description of Artificial Sequence: Synthetic polynucleotide"
aagcgcggtcggaagaagctgctgtacatctttaagcaacccttcatgaggcctgtgcagactactcaagaggaggacggctgttcatgccggttcccagaggaggaggaaggcggctgcgaactg

SEQ ID NO: 293 - DNA, 336 bp, Artificial Sequence
  source: /note="Description of Artificial Sequence: Synthetic polynucleotide"
cgcgtgaaattcagccgcagcgcagatgctccagcctacaagcaggggcagaaccagctctacaacgaactcaatcttggtcggagagaggagtacgacgtgctggacaagcggagaggacgggacccagaaatgggcgggaagccgcgcagaaagaatccccaagagggcctgtacaacgagctccaaaaggataagatggcagaagcctatagcgagattggtatgaaaggggaacgcagaagaggcaaaggccacgacggactgtaccagggactcagcaccgccaccaaggacacctatgacgctcttcacatgcaggccctgccgcctcgg

SEQ ID NO: 294 - protein, 239 aa, Artificial Sequence
  source: /note="Description of Artificial Sequence: Synthetic polypeptide"
EVQLVESGGGLVQPGGSLRLSCAVSGFALSNHGMSWVRRAPGKGLEWVSGIVYSGSTYYAASVKGRFTISRDNSRNTLYLQMNSLRPEDTAIYYCSAHGGESDVWGQGTTVTVSSASGGGGSGGRASGGGGSDIQLTQSPSSLSASVGDRVTITCRASQSISSYLNWYQQKPGKAPKLLIYAASSLQSGVPSRFSGSGSGTDFTLTISSLQPEDFATYYCQQSYSTPYTFGQGTKVEIK

SEQ ID NO: 295 - DNA, 717 bp, Artificial Sequence
  source: /note="Description of Artificial Sequence: Synthetic polynucleotide"
gaagtgcaattggtggaatcagggggaggacttgtgcagcctggaggatcgctgagactgtcatgtgccgtgtccggctttgccctgtccaaccacgggatgtcctgggtccgccgcgcgcctggaaagggcctcgaatgggtgtcgggtattgtgtacagcggtagcacctactatgccgcatccgtgaaggggagattcaccatcagccgggacaactccaggaacactctgtacctccaaatgaattcgctgaggccagaggacactgccatctactactgctccgcgcatggcggagagtccgacgtctggggacaggggaccaccgtgaccgtgtctagcgcgtccggcggaggcggcagcgggggtcgggcatcagggggcggcggatcggacatccagctcacccagtccccgagctcgctgtccgcctccgtgggagatcgggtcaccatcacgtgccgcgccagccagtcgatttcctcctacctgaactggtaccaacagaagcccggaaaagccccgaagcttctcatctacgccgcctcgagcctgcagtcaggagtgccctcacggttctccggctccggttccggtactgatttcaccctgaccatttcctccctgcaaccggaggacttcgctacttactactgccagcagtcgtactccaccccctacactttcggacaaggcaccaaggtcgaaatcaag

SEQ ID NO: 296 - protein, 115 aa, Artificial Sequence
  source: /note="Description of Artificial Sequence: Synthetic polypeptide"
EVQLVESGGGLVQPGGSLRLSCAVSGFALSNHGMSWVRRAPGKGLEWVSGIVYSGSTYYAASVKGRFTISRDNSRNTLYLQMNSLRPEDTAIYYCSAHGGESDVWGQGTTVTVSS

SEQ ID NO: 297 - protein, 107 aa, Artificial Sequence
  source: /note="Description of Artificial Sequence: Synthetic polypeptide"
DIQLTQSPSSLSASVGDRVTITCRASQSISSYLNWYQQKPGKAPKLLIYAASSLQSGVPSRFSGSGSGTDFTLTISSLQPEDFATYYCQQSYSTPYTFGQGTKVEIK

SEQ ID NO: 298 - protein, 483 aa, Artificial Sequence
  source: /note="Description of Artificial Sequence: Synthetic polypeptide"
MALPVTALLLPLALLLHAARPEVQLVESGGGLVQPGGSLRLSCAVSGFALSNHGMSWVRRAPGKGLEWVSGIVYSGSTYYAASVKGRFTISRDNSRNTLYLQMNSLRPEDTAIYYCSAHGGESDVWGQGTTVTVSSASGGGGSGGRASGGGGSDIQLTQSPSSLSASVGDRVTITCRASQSISSYLNWYQQKPGKAPKLLIYAASSLQSGVPSRFSGSGSGTDFTLTISSLQPEDFATYYCQQSYSTPYTFGQGTKVEIKTTTPAPRPPTPAPTIASQPLSLRPEACRPAAGGAVHTRGLDFACDIYIWAPLAGTCGVLLLSLVITLYCKRGRKKLLYIFKQPFMRPVQTTQEEDGCSCRFPEEEEGGCELRVKFSRSADAPAYKQGQNQLYNELNLGRREEYDVLDKRRGRDPEMGGKPRRKNPQEGLYNELQKDKMAEAYSEIGMKGERRRGKGHDGLYQGLSTATKDTYDALHMQALPPR

SEQ ID NO: 299 - DNA, 1449 bp, Artificial Sequence
  source: /note="Description of Artificial Sequence: Synthetic polynucleotide"
atggccctccctgtcaccgccctgctgcttccgctggctcttctgctccacgccgctcggcccgaagtgcaattggtggaatcagggggaggacttgtgcagcctggaggatcgctgagactgtcatgtgccgtgtccggctttgccctgtccaaccacgggatgtcctgggtccgccgcgcgcctggaaagggcctcgaatgggtgtcgggtattgtgtacagcggtagcacctactatgccgcatccgtgaaggggagattcaccatcagccgggacaactccaggaacactctgtacctccaaatgaattcgctgaggccagaggacactgccatctactactgctccgcgcatggcggagagtccgacgtctggggacaggggaccaccgtgaccgtgtctagcgcgtccggcggaggcggcagcgggggtcgggcatcagggggcggcggatcggacatccagctcacccagtccccgagctcgctgtccgcctccgtgggagatcgggtcaccatcacgtgccgcgccagccagtcgatttcctcctacctgaactggtaccaacagaagcccggaaaagccccgaagcttctcatctacgccgcctcgagcctgcagtcaggagtgccctcacggttctccggctccggttccggtactgatttcaccctgaccatttcctccctgcaaccggaggacttcgctacttactactgccagcagtcgtactccaccccctacactttcggacaaggcaccaaggtcgaaatcaagaccactaccccagcaccgaggccacccaccccggctcctaccatcgcctcccagcctctgtccctgcgtccggaggcatgtagacccgcagctggtggggccgtgcatacccggggtcttgacttcgcctgcgatatctacatttgggcccctctggctggtacttgcggggtcctgctgctttcactcgtgatcactctttactgtaagcgcggtcggaagaagctgctgtacatctttaagcaacccttcatgaggcctgtgcagactactcaagaggaggacggctgttcatgccggttcccagaggaggaggaaggcggctgcgaactgcgcgtgaaattcagccgcagcgcagatgctccagcctacaagcaggggcagaaccagctctacaacgaactcaatcttggtcggagagaggagtacgacgtgctggacaagcggagaggacgggacccagaaatgggcgggaagccgcgcagaaagaatccccaagagggcctgtacaacgagctccaaaaggataagatggcagaagcctatagcgagattggtatgaaaggggaacgcagaagaggcaaaggccacgacggactgtaccagggactcagcaccgccaccaaggacacctatgacgctcttcacatgcaggccctgccgcctcgg

SEQ ID NO: 300 - protein, 246 aa, Artificial Sequence
  source: /note="Description of Artificial Sequence: Synthetic polypeptide"
QVQLVESGGGLVQPGRSLRLSCAASGFTFSNYAMSWVRQAPGKGLGWVSGISRSGENTYYADSVKGRFTISRDNSKNTLYLQMNSLRDEDTAVYYCARSPAHYYGGMDVWGQGTTVTVSSASGGGGSGGRASGGGGSDIVLTQSPGTLSLSPGERATLSCRASQSISSSFLAWYQQKPGQAPRLLIYGASRRATGIPDRFSGSGSGTDFTLTISRLEPEDSAVYYCQQYHSSPSWTFGQGTKLEIK

SEQ ID NO: 301 - DNA, 738 bp, Artificial Sequence
  source: /note="Description of Artificial Sequence: Synthetic polynucleotide"
caagtgcaactcgtggaatctggtggaggactcgtgcaacccggaagatcgcttagactgtcgtgtgccgccagcgggttcactttctcgaactacgcgatgtcctgggtccgccaggcacccggaaagggactcggttgggtgtccggcatttcccggtccggcgaaaatacctactacgccgactccgtgaagggccgcttcaccatctcaagggacaacagcaaaaacaccctgtacttgcaaatgaactccctgcgggatgaagatacagccgtgtactattgcgcccggtcgcctgcccattactacggcggaatggacgtctggggacagggaaccactgtgactgtcagcagcgcgtcgggtggcggcggctcagggggtcgggcctccggggggggagggtccgacatcgtgctgacccagtccccgggaaccctgagcctgagcccgggagagcgcgcgaccctgtcatgccgggcatcccagagcattagctcctcctttctcgcctggtatcagcagaagcccggacaggccccgaggctgctgatctacggcgctagcagaagggctaccggaatcccagaccggttctccggctccggttccgggaccgatttcacccttactatctcgcgcctggaacctgaggactccgccgtctactactgccagcagtaccactcatccccgtcgtggacgttcggacagggcaccaagctggagattaag

SEQ ID NO: 302 - protein, 120 aa, Artificial Sequence
  source: /note="Description of Artificial Sequence: Synthetic polypeptide"
QVQLVESGGGLVQPGRSLRLSCAASGFTFSNYAMSWVRQAPGKGLGWVSGISRSGENTYYADSVKGRFTISRDNSKNTLYLQMNSLRDEDTAVYYCARSPAHYYGGMDVWGQGTTVTVSS

SEQ ID NO: 303 - protein, 109 aa, Artificial Sequence
  source: /note="Description of Artificial Sequence: Synthetic polypeptide"
DIVLTQSPGTLSLSPGERATLSCRASQSISSSFLAWYQQKPGQAPRLLIYGASRRATGIPDRFSGSGSGTDFTLTISRLEPEDSAVYYCQQYHSSPSWTFGQGTKLEIK

SEQ ID NO: 304 - protein, 490 aa, Artificial Sequence
  source: /note="Description of Artificial Sequence: Synthetic polypeptide"
MALPVTALLLPLALLLHAARPQVQLVESGGGLVQPGRSLRLSCAASGFTFSNYAMSWVRQAPGKGLGWVSGISRSGENTYYADSVKGRFTISRDNSKNTLYLQMNSLRDEDTAVYYCARSPAHYYGGMDVWGQGTTVTVSSASGGGGSGGRASGGGGSDIVLTQSPGTLSLSPGERATLSCRASQSISSSFLAWYQQKPGQAPRLLIYGASRRATGIPDRFSGSGSGTDFTLTISRLEPEDSAVYYCQQYHSSPSWTFGQGTKLEIKTTTPAPRPPTPAPTIASQPLSLRPEACRPAAGGAVHTRGLDFACDIYIWAPLAGTCGVLLLSLVITLYCKRGRKKLLYIFKQPFMRPVQTTQEEDGCSCRFPEEEEGGCELRVKFSRSADAPAYKQGQNQLYNELNLGRREEYDVLDKRRGRDPEMGGKPRRKNPQEGLYNELQKDKMAEAYSEIGMKGERRRGKGHDGLYQGLSTATKDTYDALHMQALPPR

SEQ ID NO: 305 - DNA, 1470 bp, Artificial Sequence
  source: /note="Description of Artificial Sequence: Synthetic polynucleotide"
atggccctccctgtcaccgccctgctgcttccgctggctcttctgctccacgccgctcggccccaagtgcaactcgtggaatctggtggaggactcgtgcaacccggaagatcgcttagactgtcgtgtgccgccagcgggttcactttctcgaactacgcgatgtcctgggtccgccaggcacccggaaagggactcggttgggtgtccggcatttcccggtccggcgaaaatacctactacgccgactccgtgaagggccgcttcaccatctcaagggacaacagcaaaaacaccctgtacttgcaaatgaactccctgcgggatgaagatacagccgtgtactattgcgcccggtcgcctgcccattactacggcggaatggacgtctggggacagggaaccactgtgactgtcagcagcgcgtcgggtggcggcggctcagggggtcgggcctccggggggggagggtccgacatcgtgctgacccagtccccgggaaccctgagcctgagcccgggagagcgcgcgaccctgtcatgccgggcatcccagagcattagctcctcctttctcgcctggtatcagcagaagcccggacaggccccgaggctgctgatctacggcgctagcagaagggctaccggaatcccagaccggttctccggctccggttccgggaccgatttcacccttactatctcgcgcctggaacctgaggactccgccgtctactactgccagcagtaccactcatccccgtcgtggacgttcggacagggcaccaagctggagattaagaccactaccccagcaccgaggccacccaccccggctcctaccatcgcctcccagcctctgtccctgcgtccggaggcatgtagacccgcagctggtggggccgtgcatacccggggtcttgacttcgcctgcgatatctacatttgggcccctctggctggtacttgcggggtcctgctgctttcactcgtgatcactctttactgtaagcgcggtcggaagaagctgctgtacatctttaagcaacccttcatgaggcctgtgcagactactcaagaggaggacggctgttcatgccggttcccagaggaggaggaaggcggctgcgaactgcgcgtgaaattcagccgcagcgcagatgctccagcctacaagcaggggcagaaccagctctacaacgaactcaatcttggtcggagagaggagtacgacgtgctggacaagcggagaggacgggacccagaaatgggcgggaagccgcgcagaaagaatccccaagagggcctgtacaacgagctccaaaaggataagatggcagaagcctatagcgagattggtatgaaaggggaacgcagaagaggcaaaggccacgacggactgtaccagggactcagcaccgccaccaaggacacctatgacgctcttcacatgcaggccctgccgcctcgg

SEQ ID NO: 306 - protein, 244 aa, Artificial Sequence
  source: /note="Description of Artificial Sequence: Synthetic polypeptide"
QVQLVESGGGLVQPGRSLRLSCAASGFTFDDYAMHWVRQAPGKGLEWVSGISWNSGSIGYADSVKGRFTISRDNAKNSLYLQMNSLRAEDTALYYCSVHSFLAYWGQGTLVTVSSASGGGGSGGRASGGGGSDIVMTQTPLSLPVTPGEPASISCRSSQSLLHSNGYNYLDWYLQKPGQSPQLLIYLGSNRASGVPDRFSGSGSGTDFTLKISRVEAEDVGVYYCMQALQTPYTFGQGTKVEIK

SEQ ID NO: 307 - DNA, 732 bp, Artificial Sequence
  source: /note="Description of Artificial Sequence: Synthetic polynucleotide"
caagtgcaactcgtcgaatccggtggaggtctggtccaacctggtagaagcctgagactgtcgtgtgcggccagcggattcacctttgatgactatgctatgcactgggtgcggcaggccccaggaaagggcctggaatgggtgtcgggaattagctggaactccgggtccattggctacgccgactccgtgaagggccgcttcaccatctcccgcgacaacgcaaagaactccctgtacttgcaaatgaactcgctcagggctgaggataccgcgctgtactactgctccgtgcattccttcctggcctactggggacagggaactctggtcaccgtgtcgagcgcctccggcggcgggggctcgggtggacgggcctcgggcggaggggggtccgacatcgtgatgacccagaccccgctgagcttgcccgtgactcccggagagcctgcatccatctcctgccggtcatcccagtcccttctccactccaacggatacaactacctcgactggtacctccagaagccgggacagagccctcagcttctgatctacctggggtcaaatagagcctcaggagtgccggatcggttcagcggatctggttcgggaactgatttcactctgaagatttcccgcgtggaagccgaggacgtgggcgtctactactgtatgcaggcgctgcagaccccctataccttcggccaagggacgaaagtggagatcaag

SEQ ID NO: 308 - protein, 115 aa, Artificial Sequence
  source: /note="Description of Artificial Sequence: Synthetic polypeptide"
QVQLVESGGGLVQPGRSLRLSCAASGFTFDDYAMHWVRQAPGKGLEWVSGISWNSGSIGYADSVKGRFTISRDNAKNSLYLQMNSLRAEDTALYYCSVHSFLAYWGQGTLVTVSS

SEQ ID NO: 309 - protein, 112 aa, Artificial Sequence
  source: /note="Description of Artificial Sequence: Synthetic polypeptide"
DIVMTQTPLSLPVTPGEPASISCRSSQSLLHSNGYNYLDWYLQKPGQSPQLLIYLGSNRASGVPDRFSGSGSGTDFTLKISRVEAEDVGVYYCMQALQTPYTFGQGTKVEIK

SEQ ID NO: 310 - protein, 488 aa, Artificial Sequence
  source: /note="Description of Artificial Sequence: Synthetic polypeptide"
MALPVTALLLPLALLLHAARPQVQLVESGGGLVQPGRSLRLSCAASGFTFDDYAMHWVRQAPGKGLEWVSGISWNSGSIGYADSVKGRFTISRDNAKNSLYLQMNSLRAEDTALYYCSVHSFLAYWGQGTLVTVSSASGGGGSGGRASGGGGSDIVMTQTPLSLPVTPGEPASISCRSSQSLLHSNGYNYLDWYLQKPGQSPQLLIYLGSNRASGVPDRFSGSGSGTDFTLKISRVEAEDVGVYYCMQALQTPYTFGQGTKVEIKTTTPAPRPPTPAPTIASQPLSLRPEACRPAAGGAVHTRGLDFACDIYIWAPLAGTCGVLLLSLVITLYCKRGRKKLLYIFKQPFMRPVQTTQEEDGCSCRFPEEEEGGCELRVKFSRSADAPAYKQGQNQLYNELNLGRREEYDVLDKRRGRDPEMGGKPRRKNPQEGLYNELQKDKMAEAYSEIGMKGERRRGKGHDGLYQGLSTATKDTYDALHMQALPPR

SEQ ID NO: 311 - DNA, 1464 bp, Artificial Sequence
  source: /note="Description of Artificial Sequence: Synthetic polynucleotide"
atggccctccctgtcaccgccctgctgcttccgctggctcttctgctccacgccgctcggccccaagtgcaactcgtcgaatccggtggaggtctggtccaacctggtagaagcctgagactgtcgtgtgcggccagcggattcacctttgatgactatgctatgcactgggtgcggcaggccccaggaaagggcctggaatgggtgtcgggaattagctggaactccgggtccattggctacgccgactccgtgaagggccgcttcaccatctcccgcgacaacgcaaagaactccctgtacttgcaaatgaactcgctcagggctgaggataccgcgctgtactactgctccgtgcattccttcctggcctactggggacagggaactctggtcaccgtgtcgagcgcctccggcggcgggggctcgggtggacgggcctcgggcggaggggggtccgacatcgtgatgacccagaccccgctgagcttgcccgtgactcccggagagcctgcatccatctcctgccggtcatcccagtcccttctccactccaacggatacaactacctcgactggtacctccagaagccgggacagagccctcagcttctgatctacctggggtcaaatagagcctcaggagtgccggatcggttcagcggatctggttcgggaactgatttcactctgaagatttcccgcgtggaagccgaggacgtgggcgtctactactgtatgcaggcgctgcagaccccctataccttcggccaagggacgaaagtggagatcaagaccactaccccagcaccgaggccacccaccccggctcctaccatcgcctcccagcctctgtccctgcgtccggaggcatgtagacccgcagctggtggggccgtgcatacccggggtcttgacttcgcctgcgatatctacatttgggcccctctggctggtacttgcggggtcctgctgctttcactcgtgatcactctttactgtaagcgcggtcggaagaagctgctgtacatctttaagcaacccttcatgaggcctgtgcagactactcaagaggaggacggctgttcatgccggttcccagaggaggaggaaggcggctgcgaactgcgcgtgaaattcagccgcagcgcagatgctccagcctacaagcaggggcagaaccagctctacaacgaactcaatcttggtcggagagaggagtacgacgtgctggacaagcggagaggacgggacccagaaatgggcgggaagccgcgcagaaagaatccccaagagggcctgtacaacgagctccaaaaggataagatggcagaagcctatagcgagattggtatgaaaggggaacgcagaagaggcaaaggccacgacggactgtaccagggactcagcaccgccaccaaggacacctatgacgctcttcacatgcaggccctgccgcctcgg

SEQ ID NO: 312 - protein, 243 aa, Artificial Sequence
  source: /note="Description of Artificial Sequence: Synthetic polypeptide"
EVQLLESGGGLVQPGGSLRLSCAVSGFALSNHGMSWVRRAPGKGLEWVSGIVYSGSTYYAASVKGRFTISRDNSRNTLYLQMNSLRPEDTAIYYCSAHGGESDVWGQGTTVTVSSASGGGGSGGRASGGGGSDIVMTQTPLSLSVTPGQPASISCKSSQSLLRNDGKTPLYWYLQKAGQPPQLLIYEVSNRFSGVPDRFSGSGSGTDFTLKISRVEAEDVGAYYCMQNIQFPSFGGGTKLEIK

SEQ ID NO: 313 - DNA, 729 bp, Artificial Sequence
  source: /note="Description of Artificial Sequence: Synthetic polynucleotide"
gaagtgcaattgttggaatctggaggaggacttgtgcagcctggaggatcactgagactttcgtgtgcggtgtcaggcttcgccctgagcaaccacggcatgagctgggtgcggagagccccggggaagggtctggaatgggtgtccgggatcgtctactccggttcaacttactacgccgcaagcgtgaagggtcgcttcaccatttcccgcgataactcccggaacaccctgtacctccaaatgaactccctgcggcccgaggacaccgccatctactactgttccgcgcatggaggagagtccgatgtctggggacagggcactaccgtgaccgtgtcgagcgcctcggggggaggaggctccggcggtcgcgcctccggggggggtggcagcgacattgtgatgacgcagactccactctcgctgtccgtgaccccgggacagcccgcgtccatctcgtgcaagagctcccagagcctgctgaggaacgacggaaagactcctctgtattggtacctccagaaggctggacagcccccgcaactgctcatctacgaagtgtcaaatcgcttctccggggtgccggatcggttttccggctcgggatcgggcaccgacttcaccctgaaaatctccagggtcgaggccgaggacgtgggagcctactactgcatgcaaaacatccagttcccttccttcggcggcggcacaaagctggagattaag

SEQ ID NO: 314 - protein, 115 aa, Artificial Sequence
  source: /note="Description of Artificial Sequence: Synthetic polypeptide"
EVQLLESGGGLVQPGGSLRLSCAVSGFALSNHGMSWVRRAPGKGLEWVSGIVYSGSTYYAASVKGRFTISRDNSRNTLYLQMNSLRPEDTAIYYCSAHGGESDVWGQGTTVTVSS

SEQ ID NO: 315 - protein, 111 aa, Artificial Sequence
  source: /note="Description of Artificial Sequence: Synthetic polypeptide"
DIVMTQTPLSLSVTPGQPASISCKSSQSLLRNDGKTPLYWYLQKAGQPPQLLIYEVSNRFSGVPDRFSGSGSGTDFTLKISRVEAEDVGAYYCMQNIQFPSFGGGTKLEIK

SEQ ID NO: 316 - protein, 487 aa, Artificial Sequence
  source: /note="Description of Artificial Sequence: Synthetic polypeptide"
MALPVTALLLPLALLLHAARPEVQLLESGGGLVQPGGSLRLSCAVSGFALSNHGMSWVRRAPGKGLEWVSGIVYSGSTYYAASVKGRFTISRDNSRNTLYLQMNSLRPEDTAIYYCSAHGGESDVWGQGTTVTVSSASGGGGSGGRASGGGGSDIVMTQTPLSLSVTPGQPASISCKSSQSLLRNDGKTPLYWYLQKAGQPPQLLIYEVSNRFSGVPDRFSGSGSGTDFTLKISRVEAEDVGAYYCMQNIQFPSFGGGTKLEIKTTTPAPRPPTPAPTIASQPLSLRPEACRPAAGGAVHTRGLDFACDIYIWAPLAGTCGVLLLSLVITLYCKRGRKKLLYIFKQPFMRPVQTTQEEDGCSCRFPEEEEGGCELRVKFSRSADAPAYKQGQNQLYNELNLGRREEYDVLDKRRGRDPEMGGKPRRKNPQEGLYNELQKDKMAEAYSEIGMKGERRRGKGHDGLYQGLSTATKDTYDALHMQALPPR

SEQ ID NO: 317 - DNA, 1461 bp, Artificial Sequence
  source: /note="Description of Artificial Sequence: Synthetic polynucleotide"
atggccctccctgtcaccgccctgctgcttccgctggctcttctgctccacgccgctcggcccgaagtgcaattgttggaatctggaggaggacttgtgcagcctggaggatcactgagactttcgtgtgcggtgtcaggcttcgccctgagcaaccacggcatgagctgggtgcggagagccccggggaagggtctggaatgggtgtccgggatcgtctactccggttcaacttactacgccgcaagcgtgaagggtcgcttcaccatttcccgcgataactcccggaacaccctgtacctccaaatgaactccctgcggcccgaggacaccgccatctactactgttccgcgcatggaggagagtccgatgtctggggacagggcactaccgtgaccgtgtcgagcgcctcggggggaggaggctccggcggtcgcgcctccggggggggtggcagcgacattgtgatgacgcagactccactctcgctgtccgtgaccccgggacagcccgcgtccatctcgtgcaagagctcccagagcctgctgaggaacgacggaaagactcctctgtattggtacctccagaaggctggacagcccccgcaactgctcatctacgaagtgtcaaatcgcttctccggggtgccggatcggttttccggctcgggatcgggcaccgacttcaccctgaaaatctccagggtcgaggccgaggacgtgggagcctactactgcatgcaaaacatccagttcccttccttcggcggcggcacaaagctggagattaagaccactaccccagcaccgaggccacccaccccggctcctaccatcgcctcccagcctctgtccctgcgtccggaggcatgtagacccgcagctggtggggccgtgcatacccggggtcttgacttcgcctgcgatatctacatttgggcccctctggctggtacttgcggggtcctgctgctttcactcgtgatcactctttactgtaagcgcggtcggaagaagctgctgtacatctttaagcaacccttcatgaggcctgtgcagactactcaagaggaggacggctgttcatgccggttcccagaggaggaggaaggcggctgcgaactgcgcgtgaaattcagccgcagcgcagatgctccagcctacaagcaggggcagaaccagctctacaacgaactcaatcttggtcggagagaggagtacgacgtgctggacaagcggagaggacgggacccagaaatgggcgggaagccgcgcagaaagaatccccaagagggcctgtacaacgagctccaaaaggataagatggcagaagcctatagcgagattggtatgaaaggggaacgcagaagaggcaaaggccacgacggactgtaccagggactcagcaccgccaccaaggacacctatgacgctcttcacatgcaggccctgccgcctcgg

SEQ ID NO: 318 - protein, 249 aa, Artificial Sequence
  source: /note="Description of Artificial Sequence: Synthetic polypeptide"
QVQLVQSGAEVRKTGASVKVSCKASGYIFDNFGINWVRQAPGQGLEWMGWINPKNNNTNYAQKFQGRVTITADESTNTAYMEVSSLRSEDTAVYYCARGPYYYQSYMDVWGQGTMVTVSSASGGGGSGGRASGGGGSDIVMTQTPLSLPVTPGEPASISCRSSQSLLHSNGYNYLNWYLQKPGQSPQLLIYLGSKRASGVPDRFSGSGSGTDFTLHITRVGAEDVGVYYCMQALQTPYTFGQGTKLEIK

SEQ ID NO: 319 - DNA, 747 bp, Artificial Sequence
  source: /note="Description of Artificial Sequence: Synthetic polynucleotide"
caagtccaactcgtccagtccggcgcagaagtcagaaaaaccggtgctagcgtgaaagtgtcctgcaaggcctccggctacattttcgataacttcggaatcaactgggtcagacaggccccgggccaggggctggaatggatgggatggatcaaccccaagaacaacaacaccaactacgcacagaagttccagggccgcgtgactatcaccgccgatgaatcgaccaataccgcctacatggaggtgtcctccctgcggtcggaggacactgccgtgtattactgcgcgaggggcccatactactaccaaagctacatggacgtctggggacagggaaccatggtgaccgtgtcatccgcctccggtggtggaggctccggggggcgggcttcaggaggcggaggaagcgatattgtgatgacccagactccgcttagcctgcccgtgactcctggagaaccggcctccatttcctgccggtcctcgcaatcactcctgcattccaacggttacaactacctgaattggtacctccagaagcctggccagtcgccccagttgctgatctatctgggctcgaagcgcgcctccggggtgcctgaccggtttagcggatctgggagcggcacggacttcactctccacatcacccgcgtgggagcggaggacgtgggagtgtactactgtatgcaggcgctgcagactccgtacacattcggacagggcaccaagctggagatcaag

SEQ ID NO: 320 - protein, 120 aa, Artificial Sequence
  source: /note="Description of Artificial Sequence: Synthetic polypeptide"
QVQLVQSGAEVRKTGASVKVSCKASGYIFDNFGINWVRQAPGQGLEWMGWINPKNNNTNYAQKFQGRVTITADESTNTAYMEVSSLRSEDTAVYYCARGPYYYQSYMDVWGQGTMVTVSS

SEQ ID NO: 321 - protein, 112 aa, Artificial Sequence
  source: /note="Description of Artificial Sequence: Synthetic polypeptide"
DIVMTQTPLSLPVTPGEPASISCRSSQSLLHSNGYNYLNWYLQKPGQSPQLLIYLGSKRASGVPDRFSGSGSGTDFTLHITRVGAEDVGVYYCMQALQTPYTFGQGTKLEIK

SEQ ID NO: 322 - protein, 493 aa, Artificial Sequence
  source: /note="Description of Artificial Sequence: Synthetic polypeptide"
MALPVTALLLPLALLLHAARPQVQLVQSGAEVRKTGASVKVSCKASGYIFDNFGINWVRQAPGQGLEWMGWINPKNNNTNYAQKFQGRVTITADESTNTAYMEVSSLRSEDTAVYYCARGPYYYQSYMDVWGQGTMVTVSSASGGGGSGGRASGGGGSDIVMTQTPLSLPVTPGEPASISCRSSQSLLHSNGYNYLNWYLQKPGQSPQLLIYLGSKRASGVPDRFSGSGSGTDFTLHITRVGAEDVGVYYCMQALQTPYTFGQGTKLEIKTTTPAPRPPTPAPTIASQPLSLRPEACRPAAGGAVHTRGLDFACDIYIWAPLAGTCGVLLLSLVITLYCKRGRKKLLYIFKQPFMRPVQTTQEEDGCSCRFPEEEEGGCELRVKFSRSADAPAYKQGQNQLYNELNLGRREEYDVLDKRRGRDPEMGGKPRRKNPQEGLYNELQKDKMAEAYSEIGMKGERRRGKGHDGLYQGLSTATKDTYDALHMQALPPR

SEQ ID NO: 323 - DNA, 1479 bp, Artificial Sequence
  source: /note="Description of Artificial Sequence: Synthetic polynucleotide"
atggccctccctgtcaccgccctgctgcttccgctggctcttctgctccacgccgctcggccccaagtccaactcgtccagtccggcgcagaagtcagaaaaaccggtgctagcgtgaaagtgtcctgcaaggcctccggctacattttcgataacttcggaatcaactgggtcagacaggccccgggccaggggctggaatggatgggatggatcaaccccaagaacaacaacaccaactacgcacagaagttccagggccgcgtgactatcaccgccgatgaatcgaccaataccgcctacatggaggtgtcctccctgcggtcggaggacactgccgtgtattactgcgcgaggggcccatactactaccaaagctacatggacgtctggggacagggaaccatggtgaccgtgtcatccgcctccggtggtggaggctccggggggcgggcttcaggaggcggaggaagcgatattgtgatgacccagactccgcttagcctgcccgtgactcctggagaaccggcctccatttcctgccggtcctcgcaatcactcctgcattccaacggttacaactacctgaattggtacctccagaagcctggccagtcgccccagttgctgatctatctgggctcgaagcgcgcctccggggtgcctgaccggtttagcggatctgggagcggcacggacttcactctccacatcacccgcgtgggagcggaggacgtgggagtgtactactgtatgcaggcgctgcagactccgtacacattcggacagggcaccaagctggagatcaagaccactaccccagcaccgaggccacccaccccggctcctaccatcgcctcccagcctctgtccctgcgtccggaggcatgtagacccgcagctggtggggccgtgcatacccggggtcttgacttcgcctgcgatatctacatttgggcccctctggctggtacttgcggggtcctgctgctttcactcgtgatcactctttactgtaagcgcggtcggaagaagctgctgtacatctttaagcaacccttcatgaggcctgtgcagactactcaagaggaggacggctgttcatgccggttcccagaggaggaggaaggcggctgcgaactgcgcgtgaaattcagccgcagcgcagatgctccagcctacaagcaggggcagaaccagctctacaacgaactcaatcttggtcggagagaggagtacgacgtgctggacaagcggagaggacgggacccagaaatgggcgggaagccgcgcagaaagaatccccaagagggcctgtacaacgagctccaaaaggataagatggcagaagcctatagcgagattggtatgaaaggggaacgcagaagaggcaaaggccacgacggactgtaccagggactcagcaccgccaccaaggacacctatgacgctcttcacatgcaggccctgccgcctcgg

SEQ ID NO: 324 - protein, 246 aa, Artificial Sequence
  source: /note="Description of Artificial Sequence: Synthetic polypeptide"
QVQLQESGGGLVQPGGSLRLSCAASGFTFSSDAMTWVRQAPGKGLEWVSVISGSGGTTYYADSVKGRFTISRDNSKNTLYLQMNSLRAEDTAVYYCAKLDSSGYYYARGPRYWGQGTLVTVSSASGGGGSGGRASGGGGSDIQLTQSPSSLSASVGDRVTITCRASQSISSYLNWYQQKPGKAPKLLIYGASTLASGVPARFSGSGSGTHFTLTINSLQSEDSATYYCQQSYKRASFGQGTKVEIK

SEQ ID NO: 325 - DNA, 738 bp, Artificial Sequence
  source: /note="Description of Artificial Sequence: Synthetic polynucleotide"
caagtgcaacttcaagaatcaggcggaggactcgtgcagcccggaggatcattgcggctctcgtgcgccgcctcgggcttcaccttctcgagcgacgccatgacctgggtccgccaggccccggggaaggggctggaatgggtgtctgtgatttccggctccgggggaactacgtactacgccgattccgtgaaaggtcgcttcactatctcccgggacaacagcaagaacaccctttatctgcaaatgaattccctccgcgccgaggacaccgccgtgtactactgcgccaagctggactcctcgggctactactatgcccggggtccgagatactggggacagggaaccctcgtgaccgtgtcctccgcgtccggcggaggagggtcgggagggcgggcctccggcggcggcggttcggacatccagctgacccagtccccatcctcactgagcgcaagcgtgggcgacagagtcaccattacatgcagggcgtcccagagcatcagctcctacctgaactggtaccaacagaagcctggaaaggctcctaagctgttgatctacggggcttcgaccctggcatccggggtgcccgcgaggtttagcggaagcggtagcggcactcacttcactctgaccattaacagcctccagtccgaggattcagccacttactactgtcagcagtcctacaagcgggccagcttcggacagggcactaaggtcgagatcaag

SEQ ID NO: 326 - protein, 123 aa, Artificial Sequence
  source: /note="Description of Artificial Sequence: Synthetic polypeptide"
QVQLQESGGGLVQPGGSLRLSCAASGFTFSSDAMTWVRQAPGKGLEWVSVISGSGGTTYYADSVKGRFTISRDNSKNTLYLQMNSLRAEDTAVYYCAKLDSSGYYYARGPRYWGQGTLVTVSS

SEQ ID NO: 327 - protein, 106 aa, Artificial Sequence
  source: /note="Description of Artificial Sequence: Synthetic polypeptide"
DIQLTQSPSSLSASVGDRVTITCRASQSISSYLNWYQQKPGKAPKLLIYGASTLASGVPARFSGSGSGTHFTLTINSLQSEDSATYYCQQSYKRASFGQGTKVEIK

SEQ ID NO: 328 - protein, 490 aa, Artificial Sequence
  source: /note="Description of Artificial Sequence: Synthetic polypeptide"
MALPVTALLLPLALLLHAARPQVQLQESGGGLVQPGGSLRLSCAASGFTFSSDAMTWVRQAPGKGLEWVSVISGSGGTTYYADSVKGRFTISRDNSKNTLYLQMNSLRAEDTAVYYCAKLDSSGYYYARGPRYWGQGTLVTVSSASGGGGSGGRASGGGGSDIQLTQSPSSLSASVGDRVTITCRASQSISSYLNWYQQKPGKAPKLLIYGASTLASGVPARFSGSGSGTHFTLTINSLQSEDSATYYCQQSYKRASFGQGTKVEIKTTTPAPRPPTPAPTIASQPLSLRPEACRPAAGGAVHTRGLDFACDIYIWAPLAGTCGVLLLSLVITLYCKRGRKKLLYIFKQPFMRPVQTTQEEDGCSCRFPEEEEGGCELRVKFSRSADAPAYKQGQNQLYNELNLGRREEYDVLDKRRGRDPEMGGKPRRKNPQEGLYNELQKDKMAEAYSEIGMKGERRRGKGHDGLYQGLSTATKDTYDALHMQALPPR

SEQ ID NO: 329 - DNA, 1470 bp, Artificial Sequence
  source: /note="Description of Artificial Sequence: Synthetic polynucleotide"
atggccctccctgtcaccgccctgctgcttccgctggctcttctgctccacgccgctcggccccaagtgcaacttcaagaatcaggcggaggactcgtgcagcccggaggatcattgcggctctcgtgcgccgcctcgggcttcaccttctcgagcgacgccatgacctgggtccgccaggccccggggaaggggctggaatgggtgtctgtgatttccggctccgggggaactacgtactacgccgattccgtgaaaggtcgcttcactatctcccgggacaacagcaagaacaccctttatctgcaaatgaattccctccgcgccgaggacaccgccgtgtactactgcgccaagctggactcctcgggctactactatgcccggggtccgagatactggggacagggaaccctcgtgaccgtgtcctccgcgtccggcggaggagggtcgggagggcgggcctccggcggcggcggttcggacatccagctgacccagtccccatcctcactgagcgcaagcgtgggcgacagagtcaccattacatgcagggcgtcccagagcatcagctcctacctgaactggtaccaacagaagcctggaaaggctcctaagctgttgatctacggggcttcgaccctggcatccggggtgcccgcgaggtttagcggaagcggtagcggcactcacttcactctgaccattaacagcctccagtccgaggattcagccacttactactgtcagcagtcctacaagcgggccagcttcggacagggcactaaggtcgagatcaagaccactaccccagcaccgaggccacccaccccggctcctaccatcgcctcccagcctctgtccctgcgtccggaggcatgtagacccgcagctggtggggccgtgcatacccggggtcttgacttcgcctgcgatatctacatttgggcccctctggctggtacttgcggggtcctgctgctttcactcgtgatcactctttactgtaagcgcggtcggaagaagctgctgtacatctttaagcaacccttcatgaggcctgtgcagactactcaagaggaggacggctgttcatgccggttcccagaggaggaggaaggcggctgcgaactgcgcgtgaaattcagccgcagcgcagatgctccagcctacaagcaggggcagaaccagctctacaacgaactcaatcttggtcggagagaggagtacgacgtgctggacaagcggagaggacgggacccagaaatgggcgggaagccgcgcagaaagaatccccaagagggcctgtacaacgagctccaaaaggataagatggcagaagcctatagcgagattggtatgaaaggggaacgcagaagaggcaaaggccacgacggactgtaccagggactcagcaccgccaccaaggacacctatgacgctcttcacatgcaggccctgccgcctcgg

SEQ ID NO: 330 - protein, 247 aa, Artificial Sequence
  source: /note="Description of Artificial Sequence: Synthetic polypeptide"
QVQLVQSGAEVKKPGASVKVSCKASGYTFSNYGITWVRQAPGQGLEWMGWISAYNGNTNYAQKFQGRVTMTRNTSISTAYMELSSLRSEDTAVYYCARGPYYYYMDVWGKGTMVTVSSASGGGGSGGRASGGGGSEIVMTQSPLSLPVTPGEPASISCRSSQSLLYSNGYNYVDWYLQKPGQSPQLLIYLGSNRASGVPDRFSGSGSGTDFKLQISRVEAEDVGIYYCMQGRQFPYSFGQGTKVEIK

SEQ ID NO: 331 - DNA, 741 bp, Artificial Sequence
  source: /note="Description of Artificial Sequence: Synthetic polynucleotide"
caagtccaactggtccagagcggtgcagaagtgaagaagcccggagcgagcgtgaaagtgtcctgcaaggcttccgggtacaccttctccaactacggcatcacttgggtgcgccaggccccgggacagggcctggaatggatggggtggatttccgcgtacaacggcaatacgaactacgctcagaagttccagggtagagtgaccatgactaggaacacctccatttccaccgcctacatggaactgtcctccctgcggagcgaggacaccgccgtgtactattgcgcccggggaccatactactactacatggatgtctgggggaaggggactatggtcaccgtgtcatccgcctcgggaggcggcggatcaggaggacgcgcctctggtggtggaggatcggagatcgtgatgacccagagccctctctccttgcccgtgactcctggggagcccgcatccatttcatgccggagctcccagtcacttctctactccaacggctataactacgtggattggtacctccaaaagccgggccagagcccgcagctgctgatctacctgggctcgaacagggccagcggagtgcctgaccggttctccgggtcgggaagcgggaccgacttcaagctgcaaatctcgagagtggaggccgaggacgtgggaatctactactgtatgcagggccgccagtttccgtactcgttcggacagggcaccaaagtggaaatcaag

SEQ ID NO: 332 - protein, 118 aa, Artificial Sequence
  source: /note="Description of Artificial Sequence: Synthetic polypeptide"
QVQLVQSGAEVKKPGASVKVSCKASGYTFSNYGITWVRQAPGQGLEWMGWISAYNGNTNYAQKFQGRVTMTRNTSISTAYMELSSLRSEDTAVYYCARGPYYYYMDVWGKGTMVTVSS

SEQ ID NO: 333 - protein, 112 aa, Artificial Sequence
  source: /note="Description of Artificial Sequence: Synthetic polypeptide"
EIVMTQSPLSLPVTPGEPASISCRSSQSLLYSNGYNYVDWYLQKPGQSPQLLIYLGSNRASGVPDRFSGSGSGTDFKLQISRVEAEDVGIYYCMQGRQFPYSFGQGTKVEIK

SEQ ID NO: 334 - protein, 491 aa, Artificial Sequence
  source: /note="Description of Artificial Sequence: Synthetic polypeptide"
MALPVTALLLPLALLLHAARPQVQLVQSGAEVKKPGASVKVSCKASGYTFSNYGITWVRQAPGQGLEWMGWISAYNGNTNYAQKFQGRVTMTRNTSISTAYMELSSLRSEDTAVYYCARGPYYYYMDVWGKGTMVTVSSASGGGGSGGRASGGGGSEIVMTQSPLSLPVTPGEPASISCRSSQSLLYSNGYNYVDWYLQKPGQSPQLLIYLGSNRASGVPDRFSGSGSGTDFKLQISRVEAEDVGIYYCMQGRQFPYSFGQGTKVEIKTTTPAPRPPTPAPTIASQPLSLRPEACRPAAGGAVHTRGLDFACDIYIWAPLAGTCGVLLLSLVITLYCKRGRKKLLYIFKQPFMRPVQTTQEEDGCSCRFPEEEEGGCELRVKFSRSADAPAYKQGQNQLYNELNLGRREEYDVLDKRRGRDPEMGGKPRRKNPQEGLYNELQKDKMAEAYSEIGMKGERRRGKGHDGLYQGLSTATKDTYDALHMQALPPR

SEQ ID NO: 335 - DNA, 1473 bp, Artificial Sequence
  source: /note="Description of Artificial Sequence: Synthetic polynucleotide"
atggccctccctgtcaccgccctgctgcttccgctggctcttctgctccacgccgctcggccccaagtccaactggtccagagcggtgcagaagtgaagaagcccggagcgagcgtgaaagtgtcctgcaaggcttccgggtacaccttctccaactacggcatcacttgggtgcgccaggccccgggacagggcctggaatggatggggtggatttccgcgtacaacggcaatacgaactacgctcagaagttccagggtagagtgaccatgactaggaacacctccatttccaccgcctacatggaactgtcctccctgcggagcgaggacaccgccgtgtactattgcgcccggggaccatactactactacatggatgtctgggggaaggggactatggtcaccgtgtcatccgcctcgggaggcggcggatcaggaggacgcgcctctggtggtggaggatcggagatcgtgatgacccagagccctctctccttgcccgtgactcctggggagcccgcatccatttcatgccggagctcccagtcacttctctactccaacggctataactacgtggattggtacctccaaaagccgggccagagcccgcagctgctgatctacctgggctcgaacagggccagcggagtgcctgaccggttctccgggtcgggaagcgggaccgacttcaagctgcaaatctcgagagtggaggccgaggacgtgggaatctactactgtatgcagggccgccagtttccgtactcgttcggacagggcaccaaagtggaaatcaagaccactaccccagcaccgaggccacccaccccggctcctaccatcgcctcccagcctctgtccctgcgtccggaggcatgtagacccgcagctggtggggccgtgcatacccggggtcttgacttcgcctgcgatatctacatttgggcccctctggctggtacttgcggggtcctgctgctttcactcgtgatcactctttactgtaagcgcggtcggaagaagctgctgtacatctttaagcaacccttcatgaggcctgtgcagactactcaagaggaggacggctgttcatgccggttcccagaggaggaggaaggcggctgcgaactgcgcgtgaaattcagccgcagcgcagatgctccagcctacaagcaggggcagaaccagctctacaacgaactcaatcttggtcggagagaggagtacgacgtgctggacaagcggagaggacgggacccagaaatgggcgggaagccgcgcagaaagaatccccaagagggcctgtacaacgagctccaaaaggataagatggcagaagcctatagcgagattggtatgaaaggggaacgcagaagaggcaaaggccacgacggactgtaccagggactcagcaccgccaccaaggacacctatgacgctcttcacatgcaggccctgccgcctcgg

SEQ ID NO: 336 - protein, 238 aa, Artificial Sequence
  source: /note="Description of Artificial Sequence: Synthetic polypeptide"
EVQLLETGGGLVQPGGSLRLSCAVSGFALSNHGMSWVRRAPGKGLEWVSGIVYSGSTYYAASVKGRFTISRDNSRNTLYLQMNSLRPEDTAIYYCSAHGGESDVWGQGTTVTVSSASGGGGSGGRASGGGGSEIVLTQSPATLSVSPGESATLSCRASQSVSSNLAWYQQKPGQAPRLLIYGASTRASGIPDRFSGSGSGTDFTLTISSLQAEDVAVYYCQQYGSSLTFGGGTKVEIK

SEQ ID NO: 337 - DNA, 714 bp, Artificial Sequence
  source: /note="Description of Artificial Sequence: Synthetic polynucleotide"
gaagtgcaattgctcgaaactggaggaggtctggtgcaacctggaggatcacttcgcctgtcctgcgccgtgtcgggctttgccctgtccaaccatggaatgagctgggtccgccgcgcgccggggaagggcctcgaatgggtgtccggcatcgtctactccggctccacctactacgccgcgtccgtgaagggccggttcacgatttcacgggacaactcgcggaacaccctgtacctccaaatgaattcccttcggccggaggatactgccatctactactgctccgcccacggtggcgaatccgacgtctggggccagggaaccaccgtgaccgtgtccagcgcgtccgggggaggaggaagcgggggtagagcatcgggtggaggcggatcagagatcgtgctgacccagtcccccgccaccttgagcgtgtcaccaggagagtccgccaccctgtcatgccgcgccagccagtccgtgtcctccaacctggcttggtaccagcagaagccggggcaggcccctagactcctgatctatggggcgtcgacccgggcatctggaattcccgataggttcagcggatcgggctcgggcactgacttcactctgaccatctcctcgctgcaagccgaggacgtggctgtgtactactgtcagcagtacggaagctccctgactttcggtggcgggaccaaagtcgagattaag

SEQ ID NO: 338 - protein, 115 aa, Artificial Sequence
  source: /note="Description of Artificial Sequence: Synthetic polypeptide"
EVQLLETGGGLVQPGGSLRLSCAVSGFALSNHGMSWVRRAPGKGLEWVSGIVYSGSTYYAASVKGRFTISRDNSRNTLYLQMNSLRPEDTAIYYCSAHGGESDVWGQGTTVTVSS

SEQ ID NO: 339 - protein, 106 aa, Artificial Sequence
  source: /note="Description of Artificial Sequence: Synthetic polypeptide"
EIVLTQSPATLSVSPGESATLSCRASQSVSSNLAWYQQKPGQAPRLLIYGASTRASGIPDRFSGSGSGTDFTLTISSLQAEDVAVYYCQQYGSSLTFGGGTKVEIK

SEQ ID NO: 340 - protein, 482 aa, Artificial Sequence
  source: /note="Description of Artificial Sequence: Synthetic polypeptide"
MALPVTALLLPLALLLHAARPEVQLLETGGGLVQPGGSLRLSCAVSGFALSNHGMSWVRRAPGKGLEWVSGIVYSGSTYYAASVKGRFTISRDNSRNTLYLQMNSLRPEDTAIYYCSAHGGESDVWGQGTTVTVSSASGGGGSGGRASGGGGSEIVLTQSPATLSVSPGESATLSCRASQSVSSNLAWYQQKPGQAPRLLIYGASTRASGIPDRFSGSGSGTDFTLTISSLQAEDVAVYYCQQYGSSLTFGGGTKVEIKTTTPAPRPPTPAPTIASQPLSLRPEACRPAAGGAVHTRGLDFACDIYIWAPLAGTCGVLLLSLVITLYCKRGRKKLLYIFKQPFMRPVQTTQEEDGCSCRFPEEEEGGCELRVKFSRSADAPAYKQGQNQLYNELNLGRREEYDVLDKRRGRDPEMGGKPRRKNPQEGLYNELQKDKMAEAYSEIGMKGERRRGKGHDGLYQGLSTATKDTYDALHMQALPPR

SEQ ID NO: 341 - DNA, 1446 bp, Artificial Sequence
  source: /note="Description of Artificial Sequence: Synthetic polynucleotide"
atggccctccctgtcaccgccctgctgcttccgctggctcttctgctccacgccgctcggcccgaagtgcaattgctcgaaactggaggaggtctggtgcaacctggaggatcacttcgcctgtcctgcgccgtgtcgggctttgccctgtccaaccatggaatgagctgggtccgccgcgcgccggggaagggcctcgaatgggtgtccggcatcgtctactccggctccacctactacgccgcgtccgtgaagggccggttcacgatttcacgggacaactcgcggaacaccctgtacctccaaatgaattcccttcggccggaggatactgccatctactactgctccgcccacggtggcgaatccgacgtctggggccagggaaccaccgtgaccgtgtccagcgcgtccgggggaggaggaagcgggggtagagcatcgggtggaggcggatcagagatcgtgctgacccagtcccccgccaccttgagcgtgtcaccaggagagtccgccaccctgtcatgccgcgccagccagtccgtgtcctccaacctggcttggtaccagcagaagccggggcaggcccctagactcctgatctatggggcgtcgacccgggcatctggaattcccgataggttcagcggatcgggctcgggcactgacttcactctgaccatctcctcgctgcaagccgaggacgtggctgtgtactactgtcagcagtacggaagctccctgactttcggtggcgggaccaaagtcgagattaagaccactaccccagcaccgaggccacccaccccggctcctaccatcgcctcccagcctctgtccctgcgtccggaggcatgtagacccgcagctggtggggccgtgcatacccggggtcttgacttcgcctgcgatatctacatttgggcccctctggctggtacttgcggggtcctgctgctttcactcgtgatcactctttactgtaagcgcggtcggaagaagctgctgtacatctttaagcaacccttcatgaggcctgtgcagactactcaagaggaggacggctgttcatgccggttcccagaggaggaggaaggcggctgcgaactgcgcgtgaaattcagccgcagcgcagatgctccagcctacaagcaggggcagaaccagctctacaacgaactcaatcttggtcggagagaggagtacgacgtgctggacaagcggagaggacgggacccagaaatgggcgggaagccgcgcagaaagaatccccaagagggcctgtacaacgagctccaaaaggataagatggcagaagcctatagcgagattggtatgaaaggggaacgcagaagaggcaaaggccacgacggactgtaccagggactcagcaccgccaccaaggacacctatgacgctcttcacatgcaggccctgccgcctcgg

SEQ ID NO: 342 - protein, 239 aa, Artificial Sequence
  source: /note="Description of Artificial Sequence: Synthetic polypeptide"
EVQLVETGGGLVQPGGSLRLSCAVSGFALSNHGMSWVRRAPGKGLEWVSGIVYSGSTYYAASVKGRFTISRDNSRNTLYLQMNSLRPEDTAIYYCSAHGGESDVWGQGTTVTVSSASGGGGSGGRASGGGGSEIVMTQSPATLSVSPGERATLSCRASQSVSSKLAWYQQKPGQAPRLLMYGASIRATGIPDRFSGSGSGTEFTLTISSLEPEDFAVYYCQQYGSSSWTFGQGTKVEIK

SEQ ID NO: 343 - DNA, 717 bp, Artificial Sequence
  source: /note="Description of Artificial Sequence: Synthetic polynucleotide"
gaagtgcaattggtggaaactggaggaggacttgtgcaacctggaggatcattgagactgagctgcgcagtgtcgggattcgccctgagcaaccatggaatgtcctgggtcagaagggcccctggaaaaggcctcgaatgggtgtcagggatcgtgtactccggttccacttactacgccgcctccgtgaaggggcgcttcactatctcacgggataactcccgcaataccctgtacctccaaatgaacagcctgcggccggaggataccgccatctactactgttccgcccacggtggagagtctgacgtctggggccagggaactaccgtgaccgtgtcctccgcgtccggcggtggagggagcggcggccgcgccagcggcggcggaggctccgagatcgtgatgacccagagccccgctactctgtcggtgtcgcccggagaaagggcgaccctgtcctgccgggcgtcgcagtccgtgagcagcaagctggcttggtaccagcagaagccgggccaggcaccacgcctgcttatgtacggtgcctccattcgggccaccggaatcccggaccggttctcggggtcggggtccggtaccgagttcacactgaccatttcctcgctcgagcccgaggactttgccgtctattactgccagcagtacggctcctcctcatggacgttcggccaggggaccaaggtcgaaatcaag

SEQ ID NO: 344 - protein, 115 aa, Artificial Sequence
  source: /note="Description of Artificial Sequence: Synthetic polypeptide"
EVQLVETGGGLVQPGGSLRLSCAVSGFALSNHGMSWVRRAPGKGLEWVSGIVYSGSTYYAASVKGRFTISRDNSRNTLYLQMNSLRPEDTAIYYCSAHGGESDVWGQGTTVTVSS

SEQ ID NO: 345 - protein, 107 aa, Artificial Sequence
  source: /note="Description of Artificial Sequence: Synthetic polypeptide"
EIVMTQSPATLSVSPGERATLSCRASQSVSSKLAWYQQKPGQAPRLLMYGASIRATGIPDRFSGSGSGTEFTLTISSLEPEDFAVYYCQQYGSSSWTFGQGTKVEIK

SEQ ID NO: 346 - protein, 483 aa, Artificial Sequence
  source: /note="Description of Artificial Sequence: Synthetic polypeptide"
MALPVTALLLPLALLLHAARPEVQLVETGGGLVQPGGSLRLSCAVSGFALSNHGMSWVRRAPGKGLEWVSGIVYSGSTYYAASVKGRFTISRDNSRNTLYLQMNSLRPEDTAIYYCSAHGGESDVWGQGTTVTVSSASGGGGSGGRASGGGGSEIVMTQSPATLSVSPGERATLSCRASQSVSSKLAWYQQKPGQAPRLLMYGASIRATGIPDRFSGSGSGTEFTLTISSLEPEDFAVYYCQQYGSSSWTFGQGTKVEIKTTTPAPRPPTPAPTIASQPLSLRPEACRPAAGGAVHTRGLDFACDIYIWAPLAGTCGVLLLSLVITLYCKRGRKKLLYIFKQPFMRPVQTTQEEDGCSCRFPEEEEGGCELRVKFSRSADAPAYKQGQNQLYNELNLGRREEYDVLDKRRGRDPEMGGKPRRKNPQEGLYNELQKDKMAEAYSEIGMKGERRRGKGHDGLYQGLSTATKDTYDALHMQALPPR

SEQ ID NO: 347 - DNA, 1449 bp, Artificial Sequence
  source: /note="Description of Artificial Sequence: Synthetic polynucleotide"
atggccctccctgtcaccgccctgctgcttccgctggctcttctgctccacgccgctcggcccgaagtgcaattggtggaaactggaggaggacttgtgcaacctggaggatcattgagactgagctgcgcagtgtcgggattcgccctgagcaaccatggaatgtcctgggtcagaagggcccctggaaaaggcctcgaatgggtgtcagggatcgtgtactccggttccacttactacgccgcctccgtgaaggggcgcttcactatctcacgggataactcccgcaataccctgtacctccaaatgaacagcctgcggccggaggataccgccatctactactgttccgcccacggtggagagtctgacgtctggggccagggaactaccgtgaccgtgtcctccgcgtccggcggtggagggagcggcggccgcgccagcggcggcggaggctccgagatcgtgatgacccagagccccgctactctgtcggtgtcgcccggagaaagggcgaccctgtcctgccgggcgtcgcagtccgtgagcagcaagctggcttggtaccagcagaagccgggccaggcaccacgcctgcttatgtacggtgcctccattcgggccaccggaatcccggaccggttctcggggtcggggtccggtaccgagttcacactgaccatttcctcgctcgagcccgaggactttgccgtctattactgccagcagtacggctcctcctcatggacgttcggccaggggaccaaggtcgaaatcaagaccactaccccagcaccgaggccacccaccccggctcctaccatcgcctcccagcctctgtccctgcgtccggaggcatgtagacccgcagctggtggggccgtgcatacccggggtcttgacttcgcctgcgatatctacatttgggcccctctggctggtacttgcggggtcctgctgctttcactcgtgatcactctttactgtaagcgcggtcggaagaagctgctgtacatctttaagcaacccttcatgaggcctgtgcagactactcaagaggaggacggctgttcatgccggttcccagaggaggaggaaggcggctgcgaactgcgcgtgaaattcagccgcagcgcagatgctccagcctacaagcaggggcagaaccagctctacaacgaactcaatcttggtcggagagaggagtacgacgtgctggacaagcggagaggacgggacccagaaatgggcgggaagccgcgcagaaagaatccccaagagggcctgtacaacgagctccaaaaggataagatggcagaagcctatagcgagattggtatgaaaggggaacgcagaagaggcaaaggccacgacggactgtaccagggactcagcaccgccaccaaggacacctatgacgctcttcacatgcaggccctgccgcctcgg

SEQ ID NO: 348 - protein, 241 aa, Artificial Sequence
  source: /note="Description of Artificial Sequence: Synthetic polypeptide"
EVQLVETGGGVVQPGGSLRLSCAVSGFALSNHGMSWVRRAPGKGLEWVSGIVYSGSTYYAASVKGRFTISRDNSRNTLYLQMNSLRPEDTAIYYCSAHGGESDVWGQGTTVTVSSASGGGGSGGRASGGGGSEIVLTQSPGTLSLSPGERATLSCRASQSVGSTNLAWYQQKPGQAPRLLIYDASNRATGIPDRFSGGGSGTDFTLTISRLEPEDFAVYYCQQYGSSPPWTFGQGTKVEIK

SEQ ID NO: 349 - DNA, 723 bp, Artificial Sequence
  source: /note="Description of Artificial Sequence: Synthetic polynucleotide"
gaagtgcaattggtggagactggaggaggagtggtgcaacctggaggaagcctgagactgtcatgcgcggtgtcgggcttcgccctctccaaccacggaatgtcctgggtccgccgggcccctgggaaaggacttgaatgggtgtccggcatcgtgtactcgggttccacctactacgcggcctcagtgaagggccggtttactattagccgcgacaactccagaaacacactgtacctccaaatgaactcgctgcggccggaagataccgctatctactactgctccgcccatgggggagagtcggacgtctggggacagggcaccactgtcactgtgtccagcgcttccggcggtggtggaagcgggggacgggcctcaggaggcggtggcagcgagattgtgctgacccagtcccccgggaccctgagcctgtccccgggagaaagggccaccctctcctgtcgggcatcccagtccgtggggtctactaaccttgcatggtaccagcagaagcccggccaggcccctcgcctgctgatctacgacgcgtccaatagagccaccggcatcccggatcgcttcagcggaggcggatcgggcaccgacttcaccctcaccatttcaaggctggaaccggaggacttcgccgtgtactactgccagcagtatggttcgtccccaccctggacgttcggccaggggactaaggtcgagatcaag

SEQ ID NO: 350 - protein, 115 aa, Artificial Sequence
  source: /note="Description of Artificial Sequence: Synthetic polypeptide"
EVQLVETGGGVVQPGGSLRLSCAVSGFALSNHGMSWVRRAPGKGLEWVSGIVYSGSTYYAASVKGRFTISRDNSRNTLYLQMNSLRPEDTAIYYCSAHGGESDVWGQGTTVTVSS

SEQ ID NO: 351 - protein, 109 aa, Artificial Sequence
  source: /note="Description of Artificial Sequence: Synthetic polypeptide"
EIVLTQSPGTLSLSPGERATLSCRASQSVGSTNLAWYQQKPGQAPRLLIYDASNRATGIPDRFSGGGSGTDFTLTISRLEPEDFAVYYCQQYGSSPPWTFGQGTKVEIK

SEQ ID NO: 352 - protein, 485 aa, Artificial Sequence
  source: /note="Description of Artificial Sequence: Synthetic polypeptide"
MALPVTALLLPLALLLHAARPEVQLVETGGGVVQPGGSLRLSCAVSGFALSNHGMSWVRRAPGKGLEWVSGIVYSGSTYYAASVKGRFTISRDNSRNTLYLQMNSLRPEDTAIYYCSAHGGESDVWGQGTTVTVSSASGGGGSGGRASGGGGSEIVLTQSPGTLSLSPGERATLSCRASQSVGSTNLAWYQQKPGQAPRLLIYDASNRATGIPDRFSGGGSGTDFTLTISRLEPEDFAVYYCQQYGSSPPWTFGQGTKVEIKTTTPAPRPPTPAPTIASQPLSLRPEACRPAAGGAVHTRGLDFACDIYIWAPLAGTCGVLLLSLVITLYCKRGRKKLLYIFKQPFMRPVQTTQEEDGCSCRFPEEEEGGCELRVKFSRSADAPAYKQGQNQLYNELNLGRREEYDVLDKRRGRDPEMGGKPRRKNPQEGLYNELQKDKMAEAYSEIGMKGERRRGKGHDGLYQGLSTATKDTYDALHMQALPPR

SEQ ID NO: 353 - DNA, 1455 bp, Artificial Sequence
  source: /note="Description of Artificial Sequence: Synthetic polynucleotide"
atggccctccctgtcaccgccctgctgcttccgctggctcttctgctccacgccgctcggcccgaagtgcaattggtggagactggaggaggagtggtgcaacctggaggaagcctgagactgtcatgcgcggtgtcgggcttcgccctctccaaccacggaatgtcctgggtccgccgggcccctgggaaaggacttgaatgggtgtccggcatcgtgtactcgggttccacctactacgcggcctcagtgaagggccggtttactattagccgcgacaactccagaaacacactgtacctccaaatgaactcgctgcggccggaagataccgctatctactactgctccgcccatgggggagagtcggacgtctggggacagggcaccactgtcactgtgtccagcgcttccggcggtggtggaagcgggggacgggcctcaggaggcggtggcagcgagattgtgctgacccagtcccccgggaccctgagcctgtccccgggagaaagggccaccctctcctgtcgggcatcccagtccgtggggtctactaaccttgcatggtaccagcagaagcccggccaggcccctcgcctgctgatctacgacgcgtccaatagagccaccggcatcccggatcgcttcagcggaggcggatcgggcaccgacttcaccctcaccatttcaaggctggaaccggaggacttcgccgtgtactactgccagcagtatggttcgtccccaccctggacgttcggccaggggactaaggtcgagatcaagaccactaccccagcaccgaggccacccaccccggctcctaccatcgcctcccagcctctgtccctgcgtccggaggcatgtagacccgcagctggtggggccgtgcatacccggggtcttgacttcgcctgcgatatctacatttgggcccctctggctggtacttgcggggtcctgctgctttcactcgtgatcactctttactgtaagcgcggtcggaagaagctgctgtacatctttaagcaacccttcatgaggcctgtgcagactactcaagaggaggacggctgttcatgccggttcccagaggaggaggaaggcggctgcgaactgcgcgtgaaattcagccgcagcgcagatgctccagcctacaagcaggggcagaaccagctctacaacgaactcaatcttggtcggagagaggagtacgacgtgctggacaagcggagaggacgggacccagaaatgggcgggaagccgcgcagaaagaatccccaagagggcctgtacaacgagctccaaaaggataagatggcagaagcctatagcgagattggtatgaaaggggaacgcagaagaggcaaaggccacgacggactgtaccagggactcagcaccgccaccaaggacacctatgacgctcttcacatgcaggccctgccgcctcgg

SEQ ID NO: 354 - protein, 239 aa, Artificial Sequence
  source: /note="Description of Artificial Sequence: Synthetic polypeptide"
QVQLVESGGGLVKPGGSLRLSCAASGFTFSDYYMSWIRQAPGKGLEWVSYISSSGSTIYYADSVKGRFTISRDNAKNSLYLQMNSLRAEDTAVYYCARESGDGMDVWGQGTTVTVSSASGGGGSGGRASGGGGSDIQMTQSPSSLSASVGDRVTITCRASQSISSYLNWYQQKPGKAPKLLIYAASSLQSGVPSRFSGSGSGTDFTLTISSLQPEDFATYYCQQSYTLAFGQGTKVDIK

SEQ ID NO: 355 - DNA, 717 bp, Artificial Sequence
  source: /note="Description of Artificial Sequence: Synthetic polynucleotide"
caagtgcaactcgtggaatctggtggaggactcgtgaaacctggaggatcattgagactgtcatgcgcggcctcgggattcacgttctccgattactacatgagctggattcgccaggctccggggaagggactggaatgggtgtcctacatttcctcatccggctccaccatctactacgcggactccgtgaaggggagattcaccattagccgcgataacgccaagaacagcctgtaccttcagatgaactccctgcgggctgaagatactgccgtctactactgcgcaagggagagcggagatgggatggacgtctggggacagggtaccactgtgaccgtgtcgtcggcctccggcggagggggttcgggtggaagggccagcggcggcggaggcagcgacatccagatgacccagtccccctcatcgctgtccgcctccgtgggcgaccgcgtcaccatcacatgccgggcctcacagtcgatctcctcctacctcaattggtatcagcagaagcccggaaaggcccctaagcttctgatctacgcagcgtcctccctgcaatccggggtcccatctcggttctccggctcgggcagcggtaccgacttcactctgaccatctcgagcctgcagccggaggacttcgccacttactactgtcagcaaagctacaccctcgcgtttggccagggcaccaaagtggacatcaag

SEQ ID NO: 356 - protein, 117 aa, Artificial Sequence
  source: /note="Description of Artificial Sequence: Synthetic polypeptide"
QVQLVESGGGLVKPGGSLRLSCAASGFTFSDYYMSWIRQAPGKGLEWVSYISSSGSTIYYADSVKGRFTISRDNAKNSLYLQMNSLRAEDTAVYYCARESGDGMDVWGQGTTVTVSS

SEQ ID NO: 357 - protein, 105 aa, Artificial Sequence
  source: /note="Description of Artificial Sequence: Synthetic polypeptide"
DIQMTQSPSSLSASVGDRVTITCRASQSISSYLNWYQQKPGKAPKLLIYAASSLQSGVPSRFSGSGSGTDFTLTISSLQPEDFATYYCQQSYTLAFGQGTKVDIK

SEQ ID NO: 358 - protein, 483 aa, Artificial Sequence
  source: /note="Description of Artificial Sequence: Synthetic polypeptide"
MALPVTALLLPLALLLHAARPQVQLVESGGGLVKPGGSLRLSCAASGFTFSDYYMSWIRQAPGKGLEWVSYISSSGSTIYYADSVKGRFTISRDNAKNSLYLQMNSLRAEDTAVYYCARESGDGMDVWGQGTTVTVSSASGGGGSGGRASGGGGSDIQMTQSPSSLSASVGDRVTITCRASQSISSYLNWYQQKPGKAPKLLIYAASSLQSGVPSRFSGSGSGTDFTLTISSLQPEDFATYYCQQSYTLAFGQGTKVDIKTTTPAPRPPTPAPTIASQPLSLRPEACRPAAGGAVHTRGLDFACDIYIWAPLAGTCGVLLLSLVITLYCKRGRKKLLYIFKQPFMRPVQTTQEEDGCSCRFPEEEEGGCELRVKFSRSADAPAYKQGQNQLYNELNLGRREEYDVLDKRRGRDPEMGGKPRRKNPQEGLYNELQKDKMAEAYSEIGMKGERRRGKGHDGLYQGLSTATKDTYDALHMQALPPR

SEQ ID NO: 359 - DNA, 1449 bp, Artificial Sequence
  source: /note="Description of Artificial Sequence: Synthetic polynucleotide"
atggccctccctgtcaccgccctgctgcttccgctggctcttctgctccacgccgctcggccccaagtgcaactcgtggaatctggtggaggactcgtgaaacctggaggatcattgagactgtcatgcgcggcctcgggattcacgttctccgattactacatgagctggattcgccaggctccggggaagggactggaatgggtgtcctacatttcctcatccggctccaccatctactacgcggactccgtgaaggggagattcaccattagccgcgataacgccaagaacagcctgtaccttcagatgaactccctgcgggctgaagatactgccgtctactactgcgcaagggagagcggagatgggatggacgtctggggacagggtaccactgtgaccgtgtcgtcggcctccggcggagggggttcgggtggaagggccagcggcggcggaggcagcgacatccagatgacccagtccccctcatcgctgtccgcctccgtgggcgaccgcgtcaccatcacatgccgggcctcacagtcgatctcctcctacctcaattggtatcagcagaagcccggaaaggcccctaagcttctgatctacgcagcgtcctccctgcaatccggggtcccatctcggttctccggctcgggcagcggtaccgacttcactctgaccatctcgagcctgcagccggaggacttcgccacttactactgtcagcaaagctacaccctcgcgtttggccagggcaccaaagtggacatcaagaccactaccccagcaccgaggccacccaccccggctcctaccatcgcctcccagcctctgtccctgcgtccggaggcatgtagacccgcagctggtggggccgtgcatacccggggtcttgacttcgcctgcgatatctacatttgggcccctctggctggtacttgcggggtcctgctgctttcactcgtgatcactctttactgtaagcgcggtcggaagaagctgctgtacatctttaagcaacccttcatgaggcctgtgcagactactcaagaggaggacggctgttcatgccggttcccagaggaggaggaaggcggctgcgaactgcgcgtgaaattcagccgcagcgcagatgctccagcctacaagcaggggcagaaccagctctacaacgaactcaatcttggtcggagagaggagtacgacgtgctggacaagcggagaggacgggacccagaaatgggcgggaagccgcgcagaaagaatccccaagagggcctgtacaacgagctccaaaaggataagatggcagaagcctatagcgagattggtatgaaaggggaacgcagaagaggcaaaggccacgacggactgtaccagggactcagcaccgccaccaaggacacctatgacgctcttcacatgcaggccctgccgcctcgg

SEQ ID NO: 360 - protein, 246 aa, Artificial Sequence
  source: /note="Description of Artificial Sequence: Synthetic polypeptide"
QVQLVQSGGGLVKPGGSLRLSCAASGFTFSDYYMSWIRQAPGKGLEWVSYISSSGNTIYYADSVKGRFTISRDNAKNSLYLQMNSLRAEDTAVYYCARSTMVREDYWGQGTLVTVSSASGGGGSGGRASGGGGSDIVLTQSPLSLPVTLGQPASISCKSSESLVHNSGKTYLNWFHQRPGQSPRRLIYEVSNRDSGVPDRFTGSGSGTDFTLKISRVEAEDVGVYYCMQGTHWPGTFGQGTKLEIK

SEQ ID NO: 361 - DNA, 738 bp, Artificial Sequence
  source: /note="Description of Artificial Sequence: Synthetic polynucleotide"
caagtgcaactggtgcaaagcggaggaggattggtcaaacccggaggaagcctgagactgtcatgcgcggcctctggattcaccttctccgattactacatgtcatggatcagacaggccccggggaagggcctcgaatgggtgtcctacatctcgtcctccgggaacaccatctactacgccgacagcgtgaagggccgctttaccatttcccgcgacaacgcaaagaactcgctgtaccttcagatgaattccctgcgggctgaagataccgcggtgtactattgcgcccggtccactatggtccgggaggactactggggacagggcacactcgtgaccgtgtccagcgcgagcgggggtggaggcagcggtggacgcgcctccggcggcggcggttcagacatcgtgctgactcagtcgcccctgtcgctgccggtcaccctgggccaaccggcctcaattagctgcaagtcctcggagagcctggtgcacaactcaggaaagacttacctgaactggttccatcagcggcctggacagtccccacggaggctcatctatgaagtgtccaacagggattcgggggtgcccgaccgcttcactggctccgggtccggcaccgacttcaccttgaaaatctccagagtggaagccgaggacgtgggcgtgtactactgtatgcagggtacccactggcctggaacctttggacaaggaactaagctcgagattaag

SEQ ID NO: 362 - protein, 117 aa, Artificial Sequence
  source: /note="Description of Artificial Sequence: Synthetic polypeptide"
QVQLVQSGGGLVKPGGSLRLSCAASGFTFSDYYMSWIRQAPGKGLEWVSYISSSGNTIYYADSVKGRFTISRDNAKNSLYLQMNSLRAEDTAVYYCARSTMVREDYWGQGTLVTVSS

SEQ ID NO: 363 - protein, 112 aa, Artificial Sequence
  source: /note="Description of Artificial Sequence: Synthetic polypeptide"
DIVLTQSPLSLPVTLGQPASISCKSSESLVHNSGKTYLNWFHQRPGQSPRRLIYEVSNRDSGVPDRFTGSGSGTDFTLKISRVEAEDVGVYYCMQGTHWPGTFGQGTKLEIK

SEQ ID NO: 364 - protein, 490 aa, Artificial Sequence
  source: /note="Description of Artificial Sequence: Synthetic polypeptide"
MALPVTALLLPLALLLHAARPQVQLVQSGGGLVKPGGSLRLSCAASGFTFSDYYMSWIRQAPGKGLEWVSYISSSGNTIYYADSVKGRFTISRDNAKNSLYLQMNSLRAEDTAVYYCARSTMVREDYWGQGTLVTVSSASGGGGSGGRASGGGGSDIVLTQSPLSLPVTLGQPASISCKSSESLVHNSGKTYLNWFHQRPGQSPRRLIYEVSNRDSGVPDRFTGSGSGTDFTLKISRVEAEDVGVYYCMQGTHWPGTFGQGTKLEIKTTTPAPRPPTPAPTIASQPLSLRPEACRPAAGGAVHTRGLDFACDIYIWAPLAGTCGVLLLSLVITLYCKRGRKKLLYIFKQPFMRPVQTTQEEDGCSCRFPEEEEGGCELRVKFSRSADAPAYKQGQNQLYNELNLGRREEYDVLDKRRGRDPEMGGKPRRKNPQEGLYNELQKDKMAEAYSEIGMKGERRRGKGHDGLYQGLSTATKDTYDALHMQALPPR

SEQ ID NO: 365 - DNA, 1470 bp, Artificial Sequence
  source: /note="Description of Artificial Sequence: Synthetic polynucleotide"
atggccctccctgtcaccgccctgctgcttccgctggctcttctgctccacgccgctcggccccaagtgcaactggtgcaaagcggaggaggattggtcaaacccggaggaagcctgagactgtcatgcgcggcctctggattcaccttctccgattactacatgtcatggatcagacaggccccggggaagggcctcgaatgggtgtcctacatctcgtcctccgggaacaccatctactacgccgacagcgtgaagggccgctttaccatttcccgcgacaacgcaaagaactcgctgtaccttcagatgaattccctgcgggctgaagataccgcggtgtactattgcgcccggtccactatggtccgggaggactactggggacagggcacactcgtgaccgtgtccagcgcgagcgggggtggaggcagcggtggacgcgcctccggcggcggcggttcagacatcgtgctgactcagtcgcccctgtcgctgccggtcaccctgggccaaccggcctcaattagctgcaagtcctcggagagcctggtgcacaactcaggaaagacttacctgaactggttccatcagcggcctggacagtccccacggaggctcatctatgaagtgtccaacagggattcgggggtgcccgaccgcttcactggctccgggtccggcaccgacttcaccttgaaaatctccagagtggaagccgaggacgtgggcgtgtactactgtatgcagggtacccactggcctggaacctttggacaaggaactaagctcgagattaagaccactaccccagcaccgaggccacccaccccggctcctaccatcgcctcccagcctctgtccctgcgtccggaggcatgtagacccgcagctggtggggccgtgcatacccggggtcttgacttcgcctgcgatatctacatttgggcccctctggctggtacttgcggggtcctgctgctttcactcgtgatcactctttactgtaagcgcggtcggaagaagctgctgtacatctttaagcaacccttcatgaggcctgtgcagactactcaagaggaggacggctgttcatgccggttcccagaggaggaggaaggcggctgcgaactgcgcgtgaaattcagccgcagcgcagatgctccagcctacaagcaggggcagaaccagctctacaacgaactcaatcttggtcggagagaggagtacgacgtgctggacaagcggagaggacgggacccagaaatgggcgggaagccgcgcagaaagaatccccaagagggcctgtacaacgagctccaaaaggataagatggcagaagcctatagcgagattggtatgaaaggggaacgcagaagaggcaaaggccacgacggactgtaccagggactcagcaccgccaccaaggacacctatgacgctcttcacatgcaggccctgccgcctcgg

SEQ ID NO: 366 - protein, 239 aa, Artificial Sequence
  source: /note="Description of Artificial Sequence: Synthetic polypeptide"
QVQLVESGGGLVQPGGSLRLSCAVSGFALSNHGMSWVRRAPGKGLEWVSGIVYSGSTYYAASVKGRFTISRDNSRNTLYLQMNSLRPEDTAIYYCSAHGGESDVWGQGTTVTVSSASGGGGSGGRASGGGGSDIRLTQSPSPLSASVGDRVTITCQASEDINKFLNWYHQTPGKAPKLLIYDASTLQTGVPSRFSGSGSGTDFTLTINSLQPEDIGTYYCQQYESLPLTFGGGTKVEIK

SEQ ID NO: 367 - DNA, 717 bp, Artificial Sequence
  source: /note="Description of Artificial Sequence: Synthetic polynucleotide"
caagtgcaactcgtggaatctggtggaggactcgtgcaacccggtggaagccttaggctgtcgtgcgccgtcagcgggtttgctctgagcaaccatggaatgtcctgggtccgccgggcaccgggaaaagggctggaatgggtgtccggcatcgtgtacagcgggtcaacctattacgccgcgtccgtgaagggcagattcactatctcaagagacaacagccggaacaccctgtacttgcaaatgaattccctgcgccccgaggacaccgccatctactactgctccgcccacggaggagagtcggacgtgtggggccagggaacgactgtgactgtgtccagcgcatcaggagggggtggttcgggcggccgggcctcggggggaggaggttccgacattcggctgacccagtccccgtccccactgtcggcctccgtcggcgaccgcgtgaccatcacttgtcaggcgtccgaggacattaacaagttcctgaactggtaccaccagacccctggaaaggcccccaagctgctgatctacgatgcctcgacccttcaaactggagtgcctagccggttctccgggtccggctccggcactgatttcactctgaccatcaactcattgcagccggaagatatcgggacctactattgccagcagtacgaatccctcccgctcacattcggcgggggaaccaaggtcgagattaag

SEQ ID NO: 368 - protein, 115 aa, Artificial Sequence
  source: /note="Description of Artificial Sequence: Synthetic polypeptide"
QVQLVESGGGLVQPGGSLRLSCAVSGFALSNHGMSWVRRAPGKGLEWVSGIVYSGSTYYAASVKGRFTISRDNSRNTLYLQMNSLRPEDTAIYYCSAHGGESDVWGQGTTVTVSS

SEQ ID NO: 369 - protein, 107 aa, Artificial Sequence
  source: /note="Description of Artificial Sequence: Synthetic polypeptide"
DIRLTQSPSPLSASVGDRVTITCQASEDINKFLNWYHQTPGKAPKLLIYDASTLQTGVPSRFSGSGSGTDFTLTINSLQPEDIGTYYCQQYESLPLTFGGGTKVEIK

SEQ ID NO: 370 - protein, 483 aa, Artificial Sequence
  source: /note="Description of Artificial Sequence: Synthetic polypeptide"
MALPVTALLLPLALLLHAARPQVQLVESGGGLVQPGGSLRLSCAVSGFALSNHGMSWVRRAPGKGLEWVSGIVYSGSTYYAASVKGRFTISRDNSRNTLYLQMNSLRPEDTAIYYCSAHGGESDVWGQGTTVTVSSASGGGGSGGRASGGGGSDIRLTQSPSPLSASVGDRVTITCQASEDINKFLNWYHQTPGKAPKLLIYDASTLQTGVPSRFSGSGSGTDFTLTINSLQPEDIGTYYCQQYESLPLTFGGGTKVEIKTTTPAPRPPTPAPTIASQPLSLRPEACRPAAGGAVHTRGLDFACDIYIWAPLAGTCGVLLLSLVITLYCKRGRKKLLYIFKQPFMRPVQTTQEEDGCSCRFPEEEEGGCELRVKFSRSADAPAYKQGQNQLYNELNLGRREEYDVLDKRRGRDPEMGGKPRRKNPQEGLYNELQKDKMAEAYSEIGMKGERRRGKGHDGLYQGLSTATKDTYDALHMQALPPR

SEQ ID NO: 371 - DNA, 1449 bp, Artificial Sequence
  source: /note="Description of Artificial Sequence: Synthetic polynucleotide"
atggccctccctgtcaccgccctgctgcttccgctggctcttctgctccacgccgctcggccccaagtgcaactcgtggaatctggtggaggactcgtgcaacccggtggaagccttaggctgtcgtgcgccgtcagcgggtttgctctgagcaaccatggaatgtcctgggtccgccgggcaccgggaaaagggctggaatgggtgtccggcatcgtgtacagcgggtcaacctattacgccgcgtccgtgaagggcagattcactatctcaagagacaacagccggaacaccctgtacttgcaaatgaattccctgcgccccgaggacaccgccatctactactgctccgcccacggaggagagtcggacgtgtggggccagggaacgactgtgactgtgtccagcgcatcaggagggggtggttcgggcggccgggcctcggggggaggaggttccgacattcggctgacccagtccccgtccccactgtcggcctccgtcggcgaccgcgtgaccatcacttgtcaggcgtccgaggacattaacaagttcctgaactggtaccaccagacccctggaaaggcccccaagctgctgatctacgatgcctcgacccttcaaactggagtgcctagccggttctccgggtccggctccggcactgatttcactctgaccatcaactcattgcagccggaagatatcgggacctactattgccagcagtacgaatccctcccgctcacattcggcgggggaaccaaggtcgagattaagaccactaccccagcaccgaggccacccaccccggctcctaccatcgcctcccagcctctgtccctgcgtccggaggcatgtagacccgcagctggtggggccgtgcatacccggggtcttgacttcgcctgcgatatctacatttgggcccctctggctggtacttgcggggtcctgctgctttcactcgtgatcactctttactgtaagcgcggtcggaagaagctgctgtacatctttaagcaacccttcatgaggcctgtgcagactactcaagaggaggacggctgttcatgccggttcccagaggaggaggaaggcggctgcgaactgcgcgtgaaattcagccgcagcgcagatgctccagcctacaagcaggggcagaaccagctctacaacgaactcaatcttggtcggagagaggagtacgacgtgctggacaagcggagaggacgggacccagaaatgggcgggaagccgcgcagaaagaatccccaagagggcctgtacaacgagctccaaaaggataagatggcagaagcctatagcgagattggtatgaaaggggaacgcagaagaggcaaaggccacgacggactgtaccagggactcagcaccgccaccaaggacacctatgacgctcttcacatgcaggccctgccgcctcgg

SEQ ID NO: 372 - protein, 240 aa, Artificial Sequence
  source: /note="Description of Artificial Sequence: Synthetic polypeptide"
EVQLVETGGGLVQPGGSLRLSCAVSGFALSNHGMSWVRRAPGKGLEWVSGIVYSGSTYYAASVKGRFTISRDNSRNTLYLQMNSLRPEDTAIYYCSAHGGESDVWGQGTTVTVSSASGGGGSGGRASGGGGSETTLTQSPATLSVSPGERATLSCRASQSVGSNLAWYQQKPGQGPRLLIYGASTRATGIPARFSGSGSGTEFTLTISSLQPEDFAVYYCQQYNDWLPVTFGQGTKVEIK

SEQ ID NO: 373 - DNA, 720 bp, Artificial Sequence
  source: /note="Description of Artificial Sequence: Synthetic polynucleotide"
gaagtgcaattggtggaaactggaggaggacttgtgcaacctggaggatcattgcggctctcatgcgctgtctccggcttcgccctgtcaaatcacgggatgtcgtgggtcagacgggccccgggaaagggtctggaatgggtgtcggggattgtgtacagcggctccacctactacgccgcttcggtcaagggccgcttcactatttcacgggacaacagccgcaacaccctctatctgcaaatgaactctctccgcccggaggataccgccatctactactgctccgcacacggcggcgaatccgacgtgtggggacagggaaccactgtcaccgtgtcgtccgcatccggtggcggaggatcgggtggccgggcctccgggggcggcggcagcgagactaccctgacccagtcccctgccactctgtccgtgagcccgggagagagagccacccttagctgccgggccagccagagcgtgggctccaacctggcctggtaccagcagaagccaggacagggtcccaggctgctgatctacggagcctccactcgcgcgaccggcatccccgcgaggttctccgggtcgggttccgggaccgagttcaccctgaccatctcctccctccaaccggaggacttcgcggtgtactactgtcagcagtacaacgattggctgcccgtgacatttggacaggggacgaaggtggaaatcaaa

SEQ ID NO: 374 - protein, 115 aa, Artificial Sequence; identical to SEQ ID NO: 344
  source: /note="Description of Artificial Sequence: Synthetic polypeptide"

SEQ ID NO: 375 - protein, 108 aa, Artificial Sequence
  source: /note="Description of Artificial Sequence: Synthetic polypeptide"
ETTLTQSPATLSVSPGERATLSCRASQSVGSNLAWYQQKPGQGPRLLIYGASTRATGIPARFSGSGSGTEFTLTISSLQPEDFAVYYCQQYNDWLPVTFGQGTKVEIK

SEQ ID NO: 376 - protein, 484 aa, Artificial Sequence
  source: /note="Description of Artificial Sequence: Synthetic polypeptide"
MALPVTALLLPLALLLHAARPEVQLVETGGGLVQPGGSLRLSCAVSGFALSNHGMSWVRRAPGKGLEWVSGIVYSGSTYYAASVKGRFTISRDNSRNTLYLQMNSLRPEDTAIYYCSAHGGESDVWGQGTTVTVSSASGGGGSGGRASGGGGSETTLTQSPATLSVSPGERATLSCRASQSVGSNLAWYQQKPGQGPRLLIYGASTRATGIPARFSGSGSGTEFTLTISSLQPEDFAVYYCQQYNDWLPVTFGQGTKVEIKTTTPAPRPPTPAPTIASQPLSLRPEACRPAAGGAVHTRGLDFACDIYIWAPLAGTCGVLLLSLVITLYCKRGRKKLLYIFKQPFMRPVQTTQEEDGCSCRFPEEEEGGCELRVKFSRSADAPAYKQGQNQLYNELNLGRREEYDVLDKRRGRDPEMGGKPRRKNPQEGLYNELQKDKMAEAYSEIGMKGERRRGKGHDGLYQGLSTATKDTYDALHMQALPPR

SEQ ID NO: 377 - DNA, 1452 bp, Artificial Sequence
  source: /note="Description of Artificial Sequence: Synthetic polynucleotide"
atggccctccctgtcaccgccctgctgcttccgctggctcttctgctccacgccgctcggcccgaagtgcaattggtggaaactggaggaggacttgtgcaacctggaggatcattgcggctctcatgcgctgtctccggcttcgccctgtcaaatcacgggatgtcgtgggtcagacgggccccgggaaagggtctggaatgggtgtcggggattgtgtacagcggctccacctactacgccgcttcggtcaagggccgcttcactatttcacgggacaacagccgcaacaccctctatctgcaaatgaactctctccgcccggaggataccgccatctactactgctccgcacacggcggcgaatccgacgtgtggggacagggaaccactgtcaccgtgtcgtccgcatccggtggcggaggatcgggtggccgggcctccgggggcggcggcagcgagactaccctgacccagtcccctgccactctgtccgtgagcccgggagagagagccacccttagctgccgggccagccagagcgtgggctccaacctggcctggtaccagcagaagccaggacagggtcccaggctgctgatctacggagcctccactcgcgcgaccggcatccccgcgaggttctccgggtcgggttccgggaccgagttcaccctgaccatctcctccctccaaccggaggacttcgcggtgtactactgtcagcagtacaacgattggctgcccgtgacatttggacaggggacgaaggtggaaatcaaaaccactaccccagcaccgaggccacccaccccggctcctaccatcgcctcccagcctctgtccctgcgtccggaggcatgtagacccgcagctggtggggccgtgcatacccggggtcttgacttcgcctgcgatatctacatttgggcccctctggctggtacttgcggggtcctgctgctttcactcgtgatcactctttactgtaagcgcggtcggaagaagctgctgtacatctttaagcaacccttcatgaggcctgtgcagactactcaagaggaggacggctgttcatgccggttcccagaggaggaggaaggcggctgcgaactgcgcgtgaaattcagccgcagcgcagatgctccagcctacaagcaggggcagaaccagctctacaacgaactcaatcttggtcggagagaggagtacgacgtgctggacaagcggagaggacgggacccagaaatgggcgggaagccgcgcagaaagaatccccaagagggcctgtacaacgagctccaaaaggataagatggcagaagcctatagcgagattggtatgaaaggggaacgcagaagaggcaaaggccacgacggactgtaccagggactcagcaccgccaccaaggacacctatgacgctcttcacatgcaggccctgccgcctcgg

SEQ ID NO: 378 - protein, 241 aa, Artificial Sequence
  source: /note="Description of Artificial Sequence: Synthetic polypeptide"
EVQLVESGGGLVQPGGSLRLSCAVSGFALSNHGMSWVRRAPGKGLEWVSGIVYSGSTYYAASVKGRFTISRDNSRNTLYLQMNSLRPEDTAIYYCSAHGGESDVWGQGTTVTVSSASGGGGSGGRASGGGGSEIVLTQSPGTLSLSPGERATLSCRASQSIGSSSLAWYQQKPGQAPRLLMYGASSRASGIPDRFSGSGSGTDFTLTISRLEPEDFAVYYCQQYAGSPPFTFGQGTKVEIK

SEQ ID NO: 379 - DNA, 723 bp, Artificial Sequence
  source: /note="Description of Artificial Sequence: Synthetic polynucleotide"
gaagtgcaattggtggaatctggtggaggacttgtgcaacctggaggatcactgagactgtcatgcgcggtgtccggttttgccctgagcaatcatgggatgtcgtgggtccggcgcgcccccggaaagggtctggaatgggtgtcgggtatcgtctactccgggagcacttactacgccgcgagcgtgaagggccgcttcaccatttcccgcgataactcccgcaacaccctgtacttgcaaatgaactcgctccggcctgaggacactgccatctactactgctccgcacacggaggagaatccgacgtgtggggccagggaactaccgtgaccgtcagcagcgcctccggcggcgggggctcaggcggacgggctagcggcggcggtggctccgagatcgtgctgacccagtcgcctggcactctctcgctgagccccggggaaagggcaaccctgtcctgtcgggccagccagtccattggatcatcctccctcgcctggtatcagcagaaaccgggacaggctccgcggctgcttatgtatggggccagctcaagagcctccggcattcccgaccggttctccgggtccggttccggcaccgatttcaccctgactatctcgaggctggagccagaggacttcgccgtgtactactgccagcagtacgcggggtccccgccgttcacgttcggacagggaaccaaggtcgagatcaag

SEQ ID NO: 380 - protein, 115 aa, Artificial Sequence; identical to SEQ ID NO: 296
  source: /note="Description of Artificial Sequence: Synthetic polypeptide"

SEQ ID NO: 381 - protein, 109 aa, Artificial Sequence
  source: /note="Description of Artificial Sequence: Synthetic polypeptide"
EIVLTQSPGTLSLSPGERATLSCRASQSIGSSSLAWYQQKPGQAPRLLMYGASSRASGIPDRFSGSGSGTDFTLTISRLEPEDFAVYYCQQYAGSPPFTFGQGTKVEIK

SEQ ID NO: 382 - protein, 485 aa, Artificial Sequence
  source: /note="Description of Artificial Sequence: Synthetic polypeptide"
MALPVTALLLPLALLLHAARPEVQLVESGGGLVQPGGSLRLSCAVSGFALSNHGMSWVRRAPGKGLEWVSGIVYSGSTYYAASVKGRFTISRDNSRNTLYLQMNSLRPEDTAIYYCSAHGGESDVWGQGTTVTVSSASGGGGSGGRASGGGGSEIVLTQSPGTLSLSPGERATLSCRASQSIGSSSLAWYQQKPGQAPRLLMYGASSRASGIPDRFSGSGSGTDFTLTISRLEPEDFAVYYCQQYAGSPPFTFGQGTKVEIKTTTPAPRPPTPAPTIASQPLSLRPEACRPAAGGAVHTRGLDFACDIYIWAPLAGTCGVLLLSLVITLYCKRGRKKLLYIFKQPFMRPVQTTQEEDGCSCRFPEEEEGGCELRVKFSRSADAPAYKQGQNQLYNELNLGRREEYDVLDKRRGRDPEMGGKPRRKNPQEGLYNELQKDKMAEAYSEIGMKGERRRGKGHDGLYQGLSTATKDTYDALHMQALPPR

SEQ ID NO: 383 - DNA, 1455 bp, Artificial Sequence
  source: /note="Description of Artificial Sequence: Synthetic polynucleotide"
atggccctccctgtcaccgccctgctgcttccgctggctcttctgctccacgccgctcggcccgaagtgcaattggtggaatctggtggaggacttgtgcaacctggaggatcactgagactgtcatgcgcggtgtccggttttgccctgagcaatcatgggatgtcgtgggtccggcgcgcccccggaaagggtctggaatgggtgtcgggtatcgtctactccgggagcacttactacgccgcgagcgtgaagggccgcttcaccatttcccgcgataactcccgcaacaccctgtacttgcaaatgaactcgctccggcctgaggacactgccatctactactgctccgcacacggaggagaatccgacgtgtggggccagggaactaccgtgaccgtcagcagcgcctccggcggcgggggctcaggcggacgggctagcggcggcggtggctccgagatcgtgctgacccagtcgcctggcactctctcgctgagccccggggaaagggcaaccctgtcctgtcgggccagccagtccattggatcatcctccctcgcctggtatcagcagaaaccgggacaggctccgcggctgcttatgtatggggccagctcaagagcctccggcattcccgaccggttctccgggtccggttccggcaccgatttcaccctgactatctcgaggctggagccagaggacttcgccgtgtactactgccagcagtacgcggggtccccgccgttcacgttcggacagggaaccaaggtcgagatcaagaccactaccccagcaccgaggccacccaccccggctcctaccatcgcctcccagcctctgtccctgcgtccggaggcatgtagacccgcagctggtggggccgtgcatacccggggtcttgacttcgcctgcgatatctacatttgggcccctctggctggtacttgcggggtcctgctgctttcactcgtgatcactctttactgtaagcgcggtcggaagaagctgctgtacatctttaagcaacccttcatgaggcctgtgcagactactcaagaggaggacggctgttcatgccggttcccagaggaggaggaaggcggctgcgaactgcgcgtgaaattcagccgcagcgcagatgctccagcctacaagcaggggcagaaccagctctacaacgaactcaatcttggtcggagagaggagtacgacgtgctggacaagcggagaggacgggacccagaaatgggcgggaagccgcgcagaaagaatccccaagagggcctgtacaacgagctccaaaaggataagatggcagaagcctatagcgagattggtatgaaaggggaacgcagaagaggcaaaggccacgacggactgtaccagggactcagcaccgccaccaaggacacctatgacgctcttcacatgcaggccctgccgcctcgg

SEQ ID NO: 384 - protein, 243 aa, Artificial Sequence
  source: /note="Description of Artificial Sequence: Synthetic polypeptide"
QVQLQESGPGLVKPSETLSLTCTVSGGSISSSYYYWGWIRQPPGKGLEWIGSIYYSGSAYYNPSLKSRVTISVDTSKNQFSLRLSSVTAADTAVYYCARHWQEWPDAFDIWGQGTMVTVSSGGGGSGGGGSGGGGSETTLTQSPAFMSATPGDKVIISCKASQDIDDAMNWYQQKPGEAPLFIIQSATSPVPGIPPRFSGSGFGTDFSLTINNIESEDAAYYFCLQHDNFPLTFGQGTKLEIK

SEQ ID NO: 385 - DNA, 729 bp, Artificial Sequence
  source: /note="Description of Artificial Sequence: Synthetic polynucleotide"
caagtgcagcttcaggaaagcggaccgggcctggtcaagccatccgaaactctctccctgacttgcactgtgtctggcggttccatctcatcgtcgtactactactggggctggattaggcagccgcccggaaagggactggagtggatcggaagcatctactattccggctcggcgtactacaaccctagcctcaagtcgagagtgaccatctccgtggatacctccaagaaccagttttccctgcgcctgagctccgtgaccgccgctgacaccgccgtgtactactgtgctcggcattggcaggaatggcccgatgccttcgacatttggggccagggcactatggtcactgtgtcatccgggggtggaggcagcgggggaggagggtccggggggggaggttcagagacaaccttgacccagtcacccgcattcatgtccgccactccgggagacaaggtcatcatctcgtgcaaagcgtcccaggatatcgacgatgccatgaattggtaccagcagaagcctggcgaagcgccgctgttcattatccaatccgcaacctcgcccgtgcctggaatcccaccgcggttcagcggcagcggtttcggaaccgacttttccctgaccattaacaacattgagtccgaggacgccgcctactacttctgcctgcaacacgacaacttccctctcacgttcggccagggaaccaagctggaaatcaag

SEQ ID NO: 386 - protein, 121 aa, Artificial Sequence
  source: /note="Description of Artificial Sequence: Synthetic polypeptide"
QVQLQESGPGLVKPSETLSLTCTVSGGSISSSYYYWGWIRQPPGKGLEWIGSIYYSGSAYYNPSLKSRVTISVDTSKNQFSLRLSSVTAADTAVYYCARHWQEWPDAFDIWGQGTMVTVSS

SEQ ID NO: 387 - protein, 107 aa, Artificial Sequence
  source: /note="Description of Artificial Sequence: Synthetic polypeptide"
ETTLTQSPAFMSATPGDKVIISCKASQDIDDAMNWYQQKPGEAPLFIIQSATSPVPGIPPRFSGSGFGTDFSLTINNIESEDAAYYFCLQHDNFPLTFGQGTKLEIK

SEQ ID NO: 388 - protein, 487 aa, Artificial Sequence
  source: /note="Description of Artificial Sequence: Synthetic polypeptide"
MALPVTALLLPLALLLHAARPQVQLQESGPGLVKPSETLSLTCTVSGGSISSSYYYWGWIRQPPGKGLEWIGSIYYSGSAYYNPSLKSRVTISVDTSKNQFSLRLSSVTAADTAVYYCARHWQEWPDAFDIWGQGTMVTVSSGGGGSGGGGSGGGGSETTLTQSPAFMSATPGDKVIISCKASQDIDDAMNWYQQKPGEAPLFIIQSATSPVPGIPPRFSGSGFGTDFSLTINNIESEDAAYYFCLQHDNFPLTFGQGTKLEIKTTTPAPRPPTPAPTIASQPLSLRPEACRPAAGGAVHTRGLDFACDIYIWAPLAGTCGVLLLSLVITLYCKRGRKKLLYIFKQPFMRPVQTTQEEDGCSCRFPEEEEGGCELRVKFSRSADAPAYKQGQNQLYNELNLGRREEYDVLDKRRGRDPEMGGKPRRKNPQEGLYNELQKDKMAEAYSEIGMKGERRRGKGHDGLYQGLSTATKDTYDALHMQALPPR

SEQ ID NO: 389 - DNA, 1461 bp, Artificial Sequence
  source: /note="Description of Artificial Sequence: Synthetic polynucleotide"
atggccctccctgtcaccgccctgctgcttccgctggctcttctgctccacgccgctcggccccaagtgcagcttcaggaaagcggaccgggcctggtcaagccatccgaaactctctccctgacttgcactgtgtctggcggttccatctcatcgtcgtactactactggggctggattaggcagccgcccggaaagggactggagtggatcggaagcatctactattccggctcggcgtactacaaccctagcctcaagtcgagagtgaccatctccgtggatacctccaagaaccagttttccctgcgcctgagctccgtgaccgccgctgacaccgccgtgtactactgtgctcggcattggcaggaatggcccgatgccttcgacatttggggccagggcactatggtcactgtgtcatccgggggtggaggcagcgggggaggagggtccggggggggaggttcagagacaaccttgacccagtcacccgcattcatgtccgccactccgggagacaaggtcatcatctcgtgcaaagcgtcccaggatatcgacgatgccatgaattggtaccagcagaagcctggcgaagcgccgctgttcattatccaatccgcaacctcgcccgtgcctggaatcccaccgcggttcagcggcagcggtttcggaaccgacttttccctgaccattaacaacattgagtccgaggacgccgcctactacttctgcctgcaacacgacaacttccctctcacgttcggccagggaaccaagctggaaatcaagaccactaccccagcaccgaggccacccaccccggctcctaccatcgcctcccagcctctgtccctgcgtccggaggcatgtagacccgcagctggtggggccgtgcatacccggggtcttgacttcgcctgcgatatctacatttgggcccctctggctggtacttgcggggtcctgctgctttcactcgtgatcactctttactgtaagcgcggtcggaagaagctgctgtacatctttaagcaacccttcatgaggcctgtgcagactactcaagaggaggacggctgttcatgccggttcccagaggaggaggaaggcggctgcgaactgcgcgtgaaattcagccgcagcgcagatgctccagcctacaagcaggggcagaaccagctctacaacgaactcaatcttggtcggagagaggagtacgacgtgctggacaagcggagaggacgggacccagaaatgggcgggaagccgcgcagaaagaatccccaagagggcctgtacaacgagctccaaaaggataagatggcagaagcctatagcgagattggtatgaaaggggaacgcagaagaggcaaaggccacgacggactgtaccagggactcagcaccgccaccaaggacacctatgacgctcttcacatgcaggccctgccgcctcgg

SEQ ID NO: 390 - protein, 244 aa, Artificial Sequence
  source: /note="Description of Artificial Sequence: Synthetic polypeptide"
VNLRESGPALVKPTQTLTLTCTFSGFSLRTSGMCVSWIRQPPGKALEWLARIDWDEDKFYSTSLKTRLTISKDTSDNQVVLRMTNMDPADTATYYCARSGAGGTSATAFDIWGPGTMVTVSSGGGGSGGGGSGGGGSDIQMTQSPSSLSASVGDRVTITCRASQDIYNNLAWFQLKPGSAPRSLMYAANKSQSGVPSRFSGSASGTDFTLTISSLQPEDFATYYCQHYYRFPYSFGQGTKLEIK

SEQ ID NO: 391 - DNA, 735 bp, Artificial Sequence
  source: /note="Description of Artificial Sequence: Synthetic polynucleotide"
caagtcaatctgcgcgaatccggccccgccttggtcaagcctacccagaccctcactctgacctgtactttctccggcttctccctgcggacttccgggatgtgcgtgtcctggatcagacagcctccgggaaaggccctggagtggctcgctcgcattgactgggatgaggacaagttctactccacctcactcaagaccaggctgaccatcagcaaagatacctctgacaaccaagtggtgctccgcatgaccaacatggacccagccgacactgccacttactactgcgcgaggagcggagcgggcggaacctccgccaccgccttcgatatttggggcccgggtaccatggtcaccgtgtcaagcggaggaggggggtccgggggcggcggttccgggggaggcggatcggacattcagatgactcagtcaccatcgtccctgagcgctagcgtgggcgacagagtgacaatcacttgccgggcatcccaggacatctataacaaccttgcgtggttccagctgaagcctggttccgcaccgcggtcacttatgtacgccgccaacaagagccagtcgggagtgccgtcccggttttccggttcggcctcgggaactgacttcaccctgacgatctccagcctgcaacccgaggatttcgccacctactactgccagcactactaccgctttccctactcgttcggacagggaaccaagctggaaatcaag

SEQ ID NO: 392 - protein, 123 aa, Artificial Sequence
  source: /note="Description of Artificial Sequence: Synthetic polypeptide"
QVNLRESGPALVKPTQTLTLTCTFSGFSLRTSGMCVSWIRQPPGKALEWLARIDWDEDKFYSTSLKTRLTISKDTSDNQVVLRMTNMDPADTATYYCARSGAGGTSATAFDIWGPGTMVTVSS

SEQ ID NO: 393 - protein, 107 aa, Artificial Sequence
  source: /note="Description of Artificial Sequence: Synthetic polypeptide"
DIQMTQSPSSLSASVGDRVTITCRASQDIYNNLAWFQLKPGSAPRSLMYAANKSQSGVPSRFSGSASGTDFTLTISSLQPEDFATYYCQHYYRFPYSFGQGTKLEIK

SEQ ID NO: 394 - protein, 489 aa, Artificial Sequence
  source: /note="Description of Artificial Sequence: Synthetic polypeptide"
MALPVTALLLPLALLLHAARPQVNLRESGPALVKPTQTLTLTCTFSGFSLRTSGMCVSWIRQPPGKALEWLARIDWDEDKFYSTSLKTRLTISKDTSDNQVVLRMTNMDPADTATYYCARSGAGGTSATAFDIWGPGTMVTVSSGGGGSGGGGSGGGGSDIQMTQSPSSLSASVGDRVTITCRASQDIYNNLAWFQLKPGSAPRSLMYAANKSQSGVPSRFSGSASGTDFTLTISSLQPEDFATYYCQHYYRFPYSFGQGTKLEIKTTTPAPRPPTPAPTIASQPLSLRPEACRPAAGGAVHTRGLDFACDIYIWAPLAGTCGVLLLSLVITLYCKRGRKKLLYIFKQPFMRPVQTTQEEDGCSCRFPEEEEGGCELRVKFSRSADAPAYKQGQNQLYNELNLGRREEYDVLDKRRGRDPEMGGKPRRKNPQEGLYNELQKDKMAEAYSEIGMKGERRRGKGHDGLYQGLSTATKDTYDALHMQALPPR

SEQ ID NO: 395 - DNA, 1467 bp, Artificial Sequence
  source: /note="Description of Artificial Sequence: Synthetic polynucleotide"
atggccctccctgtcaccgccctgctgcttccgctggctcttctgctccacgccgctcggccccaagtcaatctgcgcgaatccggccccgccttggtcaagcctacccagaccctcactctgacctgtactttctccggcttctccctgcggacttccgggatgtgcgtgtcctggatcagacagcctccgggaaaggccctggagtggctcgctcgcattgactgggatgaggacaagttctactccacctcactcaagaccaggctgaccatcagcaaagatacctctgacaaccaagtggtgctccgcatgaccaacatggacccagccgacactgccacttactactgcgcgaggagcggagcgggcggaacctccgccaccgccttcgatatttggggcccgggtaccatggtcaccgtgtcaagcggaggaggggggtccgggggcggcggttccgggggaggcggatcggacattcagatgactcagtcaccatcgtccctgagcgctagcgtgggcgacagagtgacaatcacttgccgggcatcccaggacatctataacaaccttgcgtggttccagctgaagcctggttccgcaccgcggtcacttatgtacgccgccaacaagagccagtcgggagtgccgtcccggttttccggttcggcctcgggaactgacttcaccctgacgatctccagcctgcaacccgaggatttcgccacctactactgccagcactactaccgctttccctactcgttcggacagggaaccaagctggaaatcaagaccactaccccagcaccgaggccacccaccccggctcctaccatcgcctcccagcctctgtccctgcgtccggaggcatgtagacccgcagctggtggggccgtgcatacccggggtcttgacttcgcctgcgatatctacatttgggcccctctggctggtacttgcggggtcctgctgctttcactcgtgatcactctttactgtaagcgcggtcggaagaagctgctgtacatctttaagcaacccttcatgaggcctgtgcagactactcaagaggaggacggctgttcatgccggttcccagaggaggaggaaggcggctgcgaactgcgcgtgaaattcagccgcagcgcagatgctccagcctacaagcaggggcagaaccagctctacaacgaactcaatcttggtcggagagaggagtacgacgtgctggacaagcggagaggacgggacccagaaatgggcgggaagccgcgcagaaagaatccccaagagggcctgtacaacgagctccaaaaggataagatggcagaagcctatagcgagattggtatgaaaggggaacgcagaagaggcaaaggccacgacggactgtaccagggactcagcaccgccaccaaggacacctatgacgctcttcacatgcaggccctgccgcctcgg

SEQ ID NO: 396 - protein, 246 aa, Artificial Sequence
  source: /note="Description of Artificial Sequence: Synthetic polypeptide"
EVQLVESGGGLVKPGGSLRLSCAASGFTFSSYSMNWVRQAPGKGLEWVSSISSSSSYIYYADSVKGRFTISRDNAKNSLYLQMNSLRAEDTAVYYCAKTIAAVYAFDIWGQGTTVTVSSGGGGSGGGGSGGGGSEIVLTQSPLSLPVTPEEPASISCRSSQSLLHSNGYNYLDWYLQKPGQSPQLLIYLGSNRASGVPDRFSGSGSGTDFTLKISRVEAEDVGVYYCMQALQTPYTFGQGTKLEIK

SEQ ID NO: 397 - DNA, 738 bp, Artificial Sequence
  source: /note="Description of Artificial Sequence: Synthetic polynucleotide"
gaagtgcagcttgtcgaatccggggggggactggtcaagccgggcggatcactgagactgtcctgcgccgcgagcggcttcacgttctcctcctactccatgaactgggtccgccaagcccccgggaagggactggaatgggtgtcctctatctcctcgtcgtcgtcctacatctactacgccgactccgtgaagggaagattcaccatttcccgcgacaacgcaaagaactcactgtacttgcaaatgaactcactccgggccgaagatactgctgtgtactattgcgccaagactattgccgccgtctacgctttcgacatctggggccagggaaccaccgtgactgtgtcgtccggtggtggtggctcgggcggaggaggaagcggcggcggggggtccgagattgtgctgacccagtcgccactgagcctccctgtgacccccgaggaacccgccagcatcagctgccggtccagccagtccctgctccactccaacggatacaattacctcgattggtaccttcagaagcctggacaaagcccgcagctgctcatctacttgggatcaaaccgcgcgtcaggagtgcctgaccggttctccggctcgggcagcggtaccgatttcaccctgaaaatctccagggtggaggcagaggacgtgggagtgtattactgtatgcaggcgctgcagactccgtacacatttgggcagggcaccaagctggagatcaag

SEQ ID NO: 398 - protein, 119 aa, Artificial Sequence
  source: /note="Description of Artificial Sequence: Synthetic polypeptide"
EVQLVESGGGLVKPGGSLRLSCAASGFTFSSYSMNWVRQAPGKGLEWVSSISSSSSYIYYADSVKGRFTISRDNAKNSLYLQMNSLRAEDTAVYYCAKTIAAVYAFDIWGQGTTVTVSS

SEQ ID NO: 399 - protein, 112 aa, Artificial Sequence
  source: /note="Description of Artificial Sequence: Synthetic polypeptide"
EIVLTQSPLSLPVTPEEPASISCRSSQSLLHSNGYNYLDWYLQKPGQSPQLLIYLGSNRASGVPDRFSGSGSGTDFTLKISRVEAEDVGVYYCMQALQTPYTFGQGTKLEIK

SEQ ID NO: 400 - protein, 490 aa, Artificial Sequence
  source: /note="Description of Artificial Sequence: Synthetic polypeptide"
MALPVTALLLPLALLLHAARPEVQLVESGGGLVKPGGSLRLSCAASGFTFSSYSMNWVRQAPGKGLEWVSSISSSSSYIYYADSVKGRFTISRDNAKNSLYLQMNSLRAEDTAVYYCAKTIAAVYAFDIWGQGTTVTVSSGGGGSGGGGSGGGGSEIVLTQSPLSLPVTPEEPASISCRSSQSLLHSNGYNYLDWYLQKPGQSPQLLIYLGSNRASGVPDRFSGSGSGTDFTLKISRVEAEDVGVYYCMQALQTPYTFGQGTKLEIKTTTPAPRPPTPAPTIASQPLSLRPEACRPAAGGAVHTRGLDFACDIYIWAPLAGTCGVLLLSLVITLYCKRGRKKLLYIFKQPFMRPVQTTQEEDGCSCRFPEEEEGGCELRVKFSRSADAPAYKQGQNQLYNELNLGRREEYDVLDKRRGRDPEMGGKPRRKNPQEGLYNELQKDKMAEAYSEIGMKGERRRGKGHDGLYQGLSTATKDTYDALHMQALPPR

SEQ ID NO: 401 - DNA, 1470 bp, Artificial Sequence
  source: /note="Description of Artificial Sequence: Synthetic polynucleotide"
atggccctccctgtcaccgccctgctgcttccgctggctcttctgctccacgccgctcggcccgaagtgcagcttgtcgaatccggggggggactggtcaagccgggcggatcactgagactgtcctgcgccgcgagcggcttcacgttctcctcctactccatgaactgggtccgccaagcccccgggaagggactggaatgggtgtcctctatctcctcgtcgtcgtcctacatctactacgccgactccgtgaagggaagattcaccatttcccgcgacaacgcaaagaactcactgtacttgcaaatgaactcactccgggccgaagatactgctgtgtactattgcgccaagactattgccgccgtctacgctttcgacatctggggccagggaaccaccgtgactgtgtcgtccggtggtggtggctcgggcggaggaggaagcggcggcggggggtccgagattgtgctgacccagtcgccactgagcctccctgtgacccccgaggaacccgccagcatcagctgccggtccagccagtccctgctccactccaacggatacaattacctcgattggtaccttcagaagcctggacaaagcccgcagctgctcatctacttgggatcaaaccgcgcgtcaggagtgcctgaccggttctccggctcgggcagcggtaccgatttcaccctgaaaatctccagggtggaggcagaggacgtgggagtgtattactgtatgcaggcgctgcagactccgtacacatttgggcagggcaccaagctggagatcaagaccactaccccagcaccgaggccacccaccccggctcctaccatcgcctcccagcctctgtccctgcgtccggaggcatgtagacccgcagctggtggggccgtgcatacccggggtcttgacttcgcctgcgatatctacatttgggcccctctggctggtacttgcggggtcctgctgctttcactcgtgatcactctttactgtaagcgcggtcggaagaagctgctgtacatctttaagcaacccttcatgaggcctgtgcagactactcaagaggaggacggctgttcatgccggttcccagaggaggaggaaggcggctgcgaactgcgcgtgaaattcagccgcagcgcagatgctccagcctacaagcaggggcagaaccagctctacaacgaactcaatcttggtcggagagaggagtacgacgtgctggacaagcggagaggacgggacccagaaatgggcgggaagccgcgcagaaagaatccccaagagggcctgtacaacgagctccaaaaggataagatggcagaagcctatagcgagattggtatgaaaggggaacgcagaagaggcaaaggccacgacggactgtaccagggactcagcaccgccaccaaggacacctatgacgctcttcacatgcaggccctgccgcctcgg

SEQ ID NO: 402 - protein, 240 aa, Artificial Sequence
  source: /note="Description of Artificial Sequence: Synthetic polypeptide"
EVQLVESGGGLVKPGGSLRLSCAASGFTFSDYYMSWIRQAPGKGLEWVSYISSSGSTIYYADSVKGRFTISRDNAKNSLYLQMNSLRAEDTAVYYCARDLRGAFDIWGQGTMVTVSSGGGGSGGGGSGGGGSSYVLTQSPSVSAAPGYTATISCGGNNIGTKSVHWYQQKPGQAPLLVIRDDSVRPSKIPGRFSGSNSGNMATLTISGVQAGDEADFYCQVWDSDSEHVVFGGGTKLTVL

SEQ ID NO: 403 - DNA, 720 bp, Artificial Sequence
  source: /note="Description of Artificial Sequence: Synthetic polynucleotide"
gaagtccagctcgtggagtccggcggaggccttgtgaagcctggaggttcgctgagactgtcctgcgccgcctccggcttcaccttctccgactactacatgtcctggatcagacaggccccgggaaagggcctggaatgggtgtcctacatctcgtcatcgggcagcactatctactacgcggactcagtgaaggggcggttcaccatttcccgggataacgcgaagaactcgctgtatctgcaaatgaactcactgagggccgaggacaccgccgtgtactactgcgcccgcgatctccgcggggcatttgacatctggggacagggaaccatggtcacagtgtccagcggagggggaggatcgggtggcggaggttccgggggtggaggctcctcctacgtgctgactcagagcccaagcgtcagcgctgcgcccggttacacggcaaccatctcctgtggcggaaacaacattgggaccaagtctgtgcactggtatcagcagaagccgggccaagctcccctgttggtgatccgcgatgactccgtgcggcctagcaaaattccgggacggttctccggctccaacagcggcaatatggccactctcaccatctcgggagtgcaggccggagatgaagccgacttctactgccaagtctgggactcagactccgagcatgtggtgttcgggggcggaaccaagctgactgtgctc

SEQ ID NO: 404 - protein, 117 aa, Artificial Sequence
  source: /note="Description of Artificial Sequence: Synthetic polypeptide"
EVQLVESGGGLVKPGGSLRLSCAASGFTFSDYYMSWIRQAPGKGLEWVSYISSSGSTIYYADSVKGRFTISRDNAKNSLYLQMNSLRAEDTAVYYCARDLRGAFDIWGQGTMVTVSS

SEQ ID NO: 405 - protein, 108 aa, Artificial Sequence
  source: /note="Description of Artificial Sequence: Synthetic polypeptide"
SYVLTQSPSVSAAPGYTATISCGGNNIGTKSVHWYQQKPGQAPLLVIRDDSVRPSKIPGRFSGSNSGNMATLTISGVQAGDEADFYCQVWDSDSEHVVFGGGTKLTVL

SEQ ID NO: 406 - protein, 484 aa, Artificial Sequence
  source: /note="Description of Artificial Sequence: Synthetic polypeptide"
MALPVTALLLPLALLLHAARPEVQLVESGGGLVKPGGSLRLSCAASGFTFSDYYMSWIRQAPGKGLEWVSYISSSGSTIYYADSVKGRFTISRDNAKNSLYLQMNSLRAEDTAVYYCARDLRGAFDIWGQGTMVTVSSGGGGSGGGGSGGGGSSYVLTQSPSVSAAPGYTATISCGGNNIGTKSVHWYQQKPGQAPLLVIRDDSVRPSKIPGRFSGSNSGNMATLTISGVQAGDEADFYCQVWDSDSEHVVFGGGTKLTVLTTTPAPRPPTPAPTIASQPLSLRPEACRPAAGGAVHTRGLDFACDIYIWAPLAGTCGVLLLSLVITLYCKRGRKKLLYIFKQPFMRPVQTTQEEDGCSCRFPEEEEGGCELRVKFSRSADAPAYKQGQNQLYNELNLGRREEYDVLDKRRGRDPEMGGKPRRKNPQEGLYNELQKDKMAEAYSEIGMKGERRRGKGHDGLYQGLSTATKDTYDALHMQALPPR

SEQ ID NO: 407 - DNA, 1452 bp, Artificial Sequence
  source: /note="Description of Artificial Sequence: Synthetic polynucleotide"
atggccctccctgtcaccgccctgctgcttccgctggctcttctgctccacgccgctcggcccgaagtccagctcgtggagtccggcggaggccttgtgaagcctggaggttcgctgagactgtcctgcgccgcctccggcttcaccttctccgactactacatgtcctggatcagacaggccccgggaaagggcctggaatgggtgtcctacatctcgtcatcgggcagcactatctactacgcggactcagtgaaggggcggttcaccatttcccgggataacgcgaagaactcgctgtatctgcaaatgaactcactgagggccgaggacaccgccgtgtactactgcgcccgcgatctccgcggggcatttgacatctggggacagggaaccatggtcacagtgtccagcggagggggaggatcgggtggcggaggttccgggggtggaggctcctcctacgtgctgactcagagcccaagcgtcagcgctgcgcccggttacacggcaaccatctcctgtggcggaaacaacattgggaccaagtctgtgcactggtatcagcagaagccgggccaagctcccctgttggtgatccgcgatgactccgtgcggcctagcaaaattccgggacggttctccggctccaacagcggcaatatggccactctcaccatctcgggagtgcaggccggagatgaagccgacttctactgccaagtctgggactcagactccgagcatgtggtgttcgggggcggaaccaagctgactgtgctcaccactaccccagcaccgaggccacccaccccggctcctaccatcgcctcccagcctctgtccctgcgtccggaggcatgtagacccgcagctggtggggccgtgcatacccggggtcttgacttcgcctgcgatatctacatttgggcccctctggctggtacttgcggggtcctgctgctttcactcgtgatcactctttactgtaagcgcggtcggaagaagctgctgtacatctttaagcaacccttcatgaggcctgtgcagactactcaagaggaggacggctgttcatgccggttcccagaggaggaggaaggcggctgcgaactgcgcgtgaaattcagccgcagcgcagatgctccagcctacaagcaggggcagaaccagctctacaacgaactcaatcttggtcggagagaggagtacgacgtgctggacaagcggagaggacgggacccagaaatgggcgggaagccgcgcagaaagaatccccaagagggcctgtacaacgagctccaaaaggataagatggcagaagcctatagcgagattggtatgaaaggggaacgcagaagaggcaaaggccacgacggactgtaccagggactcagcaccgccaccaaggacacctatgacgctcttcacatgcaggccctgccgcctcgg

SEQ ID NO: 408 - protein, 241 aa, Artificial Sequence
  source: /note="Description of Artificial Sequence: Synthetic polypeptide"
QVQLVQSGAEVKKPGASVKVSCKPSGYTVTSHYIHWVRRAPGQGLEWMGMINPSGGVTAYSQTLQGRVTMTSDTSSSTVYMELSSLRSEDTAMYYCAREGSGSGWYFDFWGRGTLVTVSSGGGGSGGGGSGGGGSSYVLTQPPSVSVSPGQTASITCSGDGLSKKYVSWYQQKAGQSPVVLISRDKERPSGIPDRFSGSNSADTATLTISGTQAMDEADYYCQAWDDTTVVFGGGTKLTVL

SEQ ID NO: 409 - DNA, 723 bp, Artificial Sequence
  source: /note="Description of Artificial Sequence: Synthetic polynucleotide"
caagtgcagctggtgcagagcggggccgaagtcaagaagccgggagcctccgtgaaagtgtcctgcaagccttcgggatacaccgtgacctcccactacattcattgggtccgccgcgcccccggccaaggactcgagtggatgggcatgatcaaccctagcggcggagtgaccgcgtacagccagacgctgcagggacgcgtgactatgacctcggatacctcctcctccaccgtctatatggaactgtccagcctgcggtccgaggataccgccatgtactactgcgcccgggaaggatcaggctccgggtggtatttcgacttctggggaagaggcaccctcgtgactgtgtcatctgggggagggggttccggtggtggcggatcgggaggaggcggttcatcctacgtgctgacccagccaccctccgtgtccgtgagccccggccagactgcatcgattacatgtagcggcgacggcctctccaagaaatacgtgtcgtggtaccagcagaaggccggacagagcccggtggtgctgatctcaagagataaggagcggcctagcggaatcccggacaggttctcgggttccaactccgcggacactgctactctgaccatctcggggacccaggctatggacgaagccgattactactgccaagcctgggacgacactactgtcgtgtttggagggggcaccaagttgaccgtcctt

SEQ ID NO: 410 - protein, 120 aa, Artificial Sequence
  source: /note="Description of Artificial Sequence: Synthetic polypeptide"
QVQLVQSGAEVKKPGASVKVSCKPSGYTVTSHYIHWVRRAPGQGLEWMGMINPSGGVTAYSQTLQGRVTMTSDTSSSTVYMELSSLRSEDTAMYYCAREGSGSGWYFDFWGRGTLVTVSS

SEQ ID NO: 411 - protein, 106 aa, Artificial Sequence
  source: /note="Description of Artificial Sequence: Synthetic polypeptide"
SYVLTQPPSVSVSPGQTASITCSGDGLSKKYVSWYQQKAGQSPVVLISRDKERPSGIPDRFSGSNSADTATLTISGTQAMDEADYYCQAWDDTTVVFGGGTKLTVL

SEQ ID NO: 412 - protein, 485 aa, Artificial Sequence
  source: /note="Description of Artificial Sequence: Synthetic polypeptide"
MALPVTALLLPLALLLHAARPQVQLVQSGAEVKKPGASVKVSCKPSGYTVTSHYIHWVRRAPGQGLEWMGMINPSGGVTAYSQTLQGRVTMTSDTSSSTVYMELSSLRSEDTAMYYCAREGSGSGWYFDFWGRGTLVTVSSGGGGSGGGGSGGGGSSYVLTQPPSVSVSPGQTASITCSGDGLSKKYVSWYQQKAGQSPVVLISRDKERPSGIPDRFSGSNSADTATLTISGTQAMDEADYYCQAWDDTTVVFGGGTKLTVLTTTPAPRPPTPAPTIASQPLSLRPEACRPAAGGAVHTRGLDFACDIYIWAPLAGTCGVLLLSLVITLYCKRGRKKLLYIFKQPFMRPVQTTQEEDGCSCRFPEEEEGGCELRVKFSRSADAPAYKQGQNQLYNELNLGRREEYDVLDKRRGRDPEMGGKPRRKNPQEGLYNELQKDKMAEAYSEIGMKGERRRGKGHDGLYQGLSTATKDTYDALHMQALPPR

SEQ ID NO: 413 - DNA, 1455 bp, Artificial Sequence
  source: /note="Description of Artificial Sequence: Synthetic polynucleotide"
atggccctccctgtcaccgccctgctgcttccgctggctcttctgctccacgccgctcggccccaagtgcagctggtgcagagcggggccgaagtcaagaagccgggagcctccgtgaaagtgtcctgcaagccttcgggatacaccgtgacctcccactacattcattgggtccgccgcgcccccggccaaggactcgagtggatgggcatgatcaaccctagcggcggagtgaccgcgtacagccagacgctgcagggacgcgtgactatgacctcggatacctcctcctccaccgtctatatggaactgtccagcctgcggtccgaggataccgccatgtactactgcgcccgggaaggatcaggctccgggtggtatttcgacttctggggaagaggcaccctcgtgactgtgtcatctgggggagggggttccggtggtggcggatcgggaggaggcggttcatcctacgtgctgacccagccaccctccgtgtccgtgagccccggccagactgcatcgattacatgtagcggcgacggcctctccaagaaatacgtgtcgtggtaccagcagaaggccggacagagcccggtggtgctgatctcaagagataaggagcggcctagcggaatcccggacaggttctcgggttccaactccgcggacactgctactctgaccatctcggggacccaggctatggacgaagccgattactactgccaagcctgggacgacactactgtcgtgtttggagggggcaccaagttgaccgtccttaccactaccccagcaccgaggccacccaccccggctcctaccatcgcctcccagcctctgtccctgcgtccggaggcatgtagacccgcagctggtggggccgtgcatacccggggtcttgacttcgcctgcgatatctacatttgggcccctctggctggtacttgcggggtcctgctgctttcactcgtgatcactctttactgtaagcgcggtcggaagaagctgctgtacatctttaagcaacccttcatgaggcctgtgcagactactcaagaggaggacggctgttcatgccggttcccagaggaggaggaaggcggctgcgaactgcgcgtgaaattcagccgcagcgcagatgctccagcctacaagcaggggcagaaccagctctacaacgaactcaatcttggtcggagagaggagtacgacgtgctggacaagcggagaggacgggacccagaaatgggcgggaagccgcgcagaaagaatccccaagagggcctgtacaacgagctccaaaaggataagatggcagaagcctatagcgagattggtatgaaaggggaacgcagaagaggcaaaggccacgacggactgtaccagggactcagcaccgccaccaaggacacctatgacgctcttcacatgcaggccctgccgcctcgg

SEQ ID NO: 414 - protein, 245 aa, Artificial Sequence
  source: /note="Description of Artificial Sequence: Synthetic polypeptide"
QVQLQESGPGLVKPSQTLSLTCTVSGGSISSGGYYWSWIRQHPGKGLEWIGYIYYSGSTYYNPSLKSRVTISVDTSKNQFSLKLSSVTAADTAVYYCARAGIAARLRGAFDIWGQGTMVTVSSGGGGSGGGGSGGGGSDIVMTQSPSSVSASVGDRVIITCRASQGIRNWLAWYQQKPGKAPNLLIYAASNLQSGVPSRFSGSGSGADFTLTISSLQPEDVATYYCQKYNSAPFTFGPGTKVDIK

SEQ ID NO: 415 - DNA, 735 bp, Artificial Sequence
  source: /note="Description of Artificial Sequence: Synthetic polynucleotide"
caagtgcagcttcaggagagcggcccgggactcgtgaagccgtcccagaccctgtccctgacttgcaccgtgtcgggaggaagcatctcgagcggaggctactattggtcgtggattcggcagcaccctggaaagggcctggaatggatcggctacatctactactccggctcgacctactacaacccatcgctgaagtccagagtgacaatctcagtggacacgtccaagaatcagttcagcctgaagctctcttccgtgactgcggccgacaccgccgtgtactactgcgcacgcgctggaattgccgcccggctgaggggtgccttcgacatttggggacagggcaccatggtcaccgtgtcctccggcggcggaggttccgggggtggaggctcaggaggaggggggtccgacatcgtcatgactcagtcgccctcaagcgtcagcgcgtccgtcggggacagagtgatcatcacctgtcgggcgtcccagggaattcgcaactggctggcctggtatcagcagaagcccggaaaggcccccaacctgttgatctacgccgcctcaaacctccaatccggggtgccgagccgcttcagcggctccggttcgggtgccgatttcactctgaccatctcctccctgcaacctgaagatgtggctacctactactgccaaaagtacaactccgcaccttttactttcggaccggggaccaaagtggacattaag

SEQ ID NO: 416 - protein, 123 aa, Artificial Sequence
  source: /note="Description of Artificial Sequence: Synthetic polypeptide"
QVQLQESGPGLVKPSQTLSLTCTVSGGSISSGGYYWSWIRQHPGKGLEWIGYIYYSGSTYYNPSLKSRVTISVDTSKNQFSLKLSSVTAADTAVYYCARAGIAARLRGAFDIWGQGTMVTVSS

SEQ ID NO: 417 - protein, 107 aa, Artificial Sequence
  source: /note="Description of Artificial Sequence: Synthetic polypeptide"
DIVMTQSPSSVSASVGDRVIITCRASQGIRNWLAWYQQKPGKAPNLLIYAASNLQSGVPSRFSGSGSGADFTLTISSLQPEDVATYYCQKYNSAPFTFGPGTKVDIK

SEQ ID NO: 418 - protein, 489 aa, Artificial Sequence
  source: /note="Description of Artificial Sequence: Synthetic polypeptide"
MALPVTALLLPLALLLHAARPQVQLQESGPGLVKPSQTLSLTCTVSGGSISSGGYYWSWIRQHPGKGLEWIGYIYYSGSTYYNPSLKSRVTISVDTSKNQFSLKLSSVTAADTAVYYCARAGIAARLRGAFDIWGQGTMVTVSSGGGGSGGGGSGGGGSDIVMTQSPSSVSASVGDRVIITCRASQGIRNWLAWYQQKPGKAPNLLIYAASNLQSGVPSRFSGSGSGADFTLTISSLQPEDVATYYCQKYNSAPFTFGPGTKVDIKTTTPAPRPPTPAPTIASQPLSLRPEACRPAAGGAVHTRGLDFACDIYIWAPLAGTCGVLLLSLVITLYCKRGRKKLLYIFKQPFMRPVQTTQEEDGCSCRFPEEEEGGCELRVKFSRSADAPAYKQGQNQLYNELNLGRREEYDVLDKRRGRDPEMGGKPRRKNPQEGLYNELQKDKMAEAYSEIGMKGERRRGKGHDGLYQGLSTATKDTYDALHMQALPPR

SEQ ID NO: 419 - DNA, 1467 bp, Artificial Sequence
  source: /note="Description of Artificial Sequence: Synthetic polynucleotide"
atggccctccctgtcaccgccctgctgcttccgctggctcttctgctccacgccgctcggccccaagtgcagcttcaggagagcggcccgggactcgtgaagccgtcccagaccctgtccctgacttgcaccgtgtcgggaggaagcatctcgagcggaggctactattggtcgtggattcggcagcaccctggaaagggcctggaatggatcggctacatctactactccggctcgacctactacaacccatcgctgaagtccagagtgacaatctcagtggacacgtccaagaatcagttcagcctgaagctctcttccgtgactgcggccgacaccgccgtgtactactgcgcacgcgctggaattgccgcccggctgaggggtgccttcgacatttggggacagggcaccatggtcaccgtgtcctccggcggcggaggttccgggggtggaggctcaggaggaggggggtccgacatcgtcatgactcagtcgccctcaagcgtcagcgcgtccgtcggggacagagtgatcatcacctgtcgggcgtcccagggaattcgcaactggctggcctggtatcagcagaagcccggaaaggcccccaacctgttgatctacgccgcctcaaacctccaatccggggtgccgagccgcttcagcggctccggttcgggtgccgatttcactctgaccatctcctccctgcaacctgaagatgtggctacctactactgccaaaagtacaactccgcaccttttactttcggaccggggaccaaagtggacattaagaccactaccccagcaccgaggccacccaccccggctcctaccatcgcctcccagcctctgtccctgcgtccggaggcatgtagacccgcagctggtggggccgtgcatacccggggtcttgacttcgcctgcgatatctacatttgggcccctctggctggtacttgcggggtcctgctgctttcactcgtgatcactctttactgtaagcgcggtcggaagaagctgctgtacatctttaagcaacccttcatgaggcctgtgcagactactcaagaggaggacggctgttcatgccggttcccagaggaggaggaaggcggctgcgaactgcgcgtgaaattcagccgcagcgcagatgctccagcctacaagcaggggcagaaccagctctacaacgaactcaatcttggtcggagagaggagtacgacgtgctggacaagcggagaggacgggacccagaaatgggcgggaagccgcgcagaaagaatccccaagagggcctgtacaacgagctccaaaaggataagatggcagaagcctatagcgagattggtatgaaaggggaacgcagaagaggcaaaggccacgacggactgtaccagggactcagcaccgccaccaaggacacctatgacgctcttcacatgcaggccctgccgcctcgg

SEQ ID NO: 420 - protein, 253 aa, Artificial Sequence
  source: /note="Description of Artificial Sequence: Synthetic polypeptide"
QVQLVQSGAEVKKPGSSVKVSCKASGGTFSSYAISWVRQAPGQGLEWMGGIIPIFGTANYAQKFQGRVTITADESTSTAYMELSSLRSEDTAVYYCARRGGYQLLRWDVGLLRSAFDIWGQGTMVTVSSGGGGSGGGGSGGGGSSYVLTQPPSVSVAPGQTARITCGGNNIGSKSVHWYQQKPGQAPVLVLYGKNNRPSGVPDRFSGSRSGTTASLTITGAQAEDEADYYCSSRDSSGDHLRVFGTGTKVTVL

SEQ ID NO: 421 - DNA, 759 bp, Artificial Sequence
  source: /note="Description of Artificial Sequence: Synthetic polynucleotide"
caagtgcagctggtccagtcgggcgccgaggtcaagaagcccgggagctctgtgaaagtgtcctgcaaggcctccgggggcacctttagctcctacgccatctcctgggtccgccaagcaccgggtcaaggcctggagtggatggggggaattatccctatcttcggcactgccaactacgcccagaagttccagggacgcgtgaccattaccgcggacgaatccacctccaccgcttatatggagctgtccagcttgcgctcggaagataccgccgtgtactactgcgcccggaggggtggataccagctgctgagatgggacgtgggcctcctgcggtcggcgttcgacatctggggccagggcactatggtcactgtgtccagcggaggaggcggatcgggaggcggcggatcagggggaggcggttccagctacgtgcttactcaacccccttcggtgtccgtggccccgggacagaccgccagaatcacttgcggaggaaacaacattgggtccaagagcgtgcattggtaccagcagaagccaggacaggcccctgtgctggtgctctacgggaagaacaatcggcccagcggagtgccggacaggttctcgggttcacgctccggtacaaccgcttcactgactatcaccggggcccaggcagaggatgaagcggactactactgttcctcccgggattcatccggcgaccacctccgggtgttcggaaccggaacgaaggtcaccgtgctg

SEQ ID NO: 422 - protein, 129 aa, Artificial Sequence
  source: /note="Description of Artificial Sequence: Synthetic polypeptide"
QVQLVQSGAEVKKPGSSVKVSCKASGGTFSSYAISWVRQAPGQGLEWMGGIIPIFGTANYAQKFQGRVTITADESTSTAYMELSSLRSEDTAVYYCARRGGYQLLRWDVGLLRSAFDIWGQGTMVTVSS

SEQ ID NO: 423 - protein, 109 aa, Artificial Sequence
  source: /note="Description of Artificial Sequence: Synthetic polypeptide"
SYVLTQPPSVSVAPGQTARITCGGNNIGSKSVHWYQQKPGQAPVLVLYGKNNRPSGVPDRFSGSRSGTTASLTITGAQAEDEADYYCSSRDSSGDHLRVFGTGTKVTVL

SEQ ID NO: 424 - protein, 497 aa, Artificial Sequence
  source: /note="Description of Artificial Sequence: Synthetic polypeptide"
MALPVTALLLPLALLLHAARPQVQLVQSGAEVKKPGSSVKVSCKASGGTFSSYAISWVRQAPGQGLEWMGGIIPIFGTANYAQKFQGRVTITADESTSTAYMELSSLRSEDTAVYYCARRGGYQLLRWDVGLLRSAFDIWGQGTMVTVSSGGGGSGGGGSGGGGSSYVLTQPPSVSVAPGQTARITCGGNNIGSKSVHWYQQKPGQAPVLVLYGKNNRPSGVPDRFSGSRSGTTASLTITGAQAEDEADYYCSSRDSSGDHLRVFGTGTKVTVLTTTPAPRPPTPAPTIASQPLSLRPEACRPAAGGAVHTRGLDFACDIYIWAPLAGTCGVLLLSLVITLYCKRGRKKLLYIFKQPFMRPVQTTQEEDGCSCRFPEEEEGGCELRVKFSRSADAPAYKQGQNQLYNELNLGRREEYDVLDKRRGRDPEMGGKPRRKNPQEGLYNELQKDKMAEAYSEIGMKGERRRGKGHDGLYQGLSTATKDTYDALHMQALPPR

SEQ ID NO: 425 - DNA, 1491 bp, Artificial Sequence
  source: /note="Description of Artificial Sequence: Synthetic polynucleotide"
atggccctccctgtcaccgccctgctgcttccgctggctcttctgctccacgccgctcggccccaagtgcagctggtccagtcgggcgccgaggtcaagaagcccgggagctctgtgaaagtgtcctgcaaggcctccgggggcacctttagctcctacgccatctcctgggtccgccaagcaccgggtcaaggcctggagtggatggggggaattatccctatcttcggcactgccaactacgcccagaagttccagggacgcgtgaccattaccgcggacgaatccacctccaccgcttatatggagctgtccagcttgcgctcggaagataccgccgtgtactactgcgcccggaggggtggataccagctgctgagatgggacgtgggcctcctgcggtcggcgttcgacatctggggccagggcactatggtcactgtgtccagcggaggaggcggatcgggaggcggcggatcagggggaggcggttccagctacgtgcttactcaacccccttcggtgtccgtggccccgggacagaccgccagaatcacttgcggaggaaacaacattgggtccaagagcgtgcattggtaccagcagaagccaggacaggcccctgtgctggtgctctacgggaagaacaatcggcccagcggagtgccggacaggttctcgggttcacgctccggtacaaccgcttcactgactatcaccggggcccaggcagaggatgaagcggactactactgttcctcccgggattcatccggcgaccacctccgggtgttcggaaccggaacgaaggtcaccgtgctgaccactaccccagcaccgaggccacccaccccggctcctaccatcgcctcccagcctctgtccctgcgtccggaggcatgtagacccgcagctggtggggccgtgcatacccggggtcttgacttcgcctgcgatatctacatttgggcccctctggctggtacttgcggggtcctgctgctttcactcgtgatcactctttactgtaagcgcggtcggaagaagctgctgtacatctttaagcaacccttcatgaggcctgtgcagactactcaagaggaggacggctgttcatgccggttcccagaggaggaggaaggcggctgcgaactgcgcgtgaaattcagccgcagcgcagatgctccagcctacaagcaggggcagaaccagctctacaacgaactcaatcttggtcggagagaggagtacgacgtgctggacaagcggagaggacgggacccagaaatgggcgggaagccgcgcagaaagaatccccaagagggcctgtacaacgagctccaaaaggataagatggcagaagcctatagcgagattggtatgaaaggggaacgcagaagaggcaaaggccacgacggactgtaccagggactcagcaccgccaccaaggacacctatgacgctcttcacatgcaggccctgccgcctcgg

SEQ ID NO: 426 - protein, 248 aa, Artificial Sequence
  source: /note="Description of Artificial Sequence: Synthetic polypeptide"
EVQLQQSGPGLVKPSQTLSLTCAISGDSVSSNSAAWNWIRQSPSRGLEWLGRTYYRSKWYSFYAISLKSRIIINPDTSKNQFSLQLKSVTPEDTAVYYCARSSPEGLFLYWFDPWGQGTLVTVSSGGDGSGGGGSGGGGSSSELTQDPAVSVALGQTIRITCQGDSLGNYYATWYQQKPGQAPVLVIYGTNNRPSGIPDRFSASSSGNTASLTITGAQAEDEADYYCNSRDSSGHHLLFGTGTKVTVL

SEQ ID NO: 427 - DNA, 744 bp, Artificial Sequence
  source: /note="Description of Artificial Sequence: Synthetic polynucleotide"
gaagtgcagctccaacagtcaggaccggggctcgtgaagccatcccagaccctgtccctgacttgtgccatctcgggagatagcgtgtcatcgaactccgccgcctggaactggattcggcagagcccgtcccgcggactggagtggcttggaaggacctactaccggtccaagtggtactctttctacgcgatctcgctgaagtcccgcattatcattaaccctgatacctccaagaatcagttctccctccaactgaaatccgtcacccccgaggacacagcagtgtattactgcgcacggagcagccccgaaggactgttcctgtattggtttgacccctggggccaggggactcttgtgaccgtgtcgagcggcggagatgggtccggtggcggtggttcggggggcggcggatcatcatccgaactgacccaggacccggctgtgtccgtggcgctgggacaaaccatccgcattacgtgccagggagactccctgggcaactactacgccacttggtaccagcagaagccgggccaagcccctgtgttggtcatctacgggaccaacaacagaccttccggcatccccgaccggttcagcgcttcgtcctccggcaacactgccagcctgaccatcactggagcgcaggccgaagatgaggccgactactactgcaacagcagagactcctcgggtcatcacctcttgttcggaactggaaccaaggtcaccgtgctg

SEQ ID NO: 428 - protein, 125 aa, Artificial Sequence
  source: /note="Description of Artificial Sequence: Synthetic polypeptide"
EVQLQQSGPGLVKPSQTLSLTCAISGDSVSSNSAAWNWIRQSPSRGLEWLGRTYYRSKWYSFYAISLKSRIIINPDTSKNQFSLQLKSVTPEDTAVYYCARSSPEGLFLYWFDPWGQGTLVTVSS

SEQ ID NO: 429 - protein, 108 aa, Artificial Sequence
  source: /note="Description of Artificial Sequence: Synthetic polypeptide"
SSELTQDPAVSVALGQTIRITCQGDSLGNYYATWYQQKPGQAPVLVIYGTNNRPSGIPDRFSASSSGNTASLTITGAQAEDEADYYCNSRDSSGHHLLFGTGTKVTVL

SEQ ID NO: 430 - protein, 492 aa, Artificial Sequence
  source: /note="Description of Artificial Sequence: Synthetic polypeptide"
MALPVTALLLPLALLLHAARPEVQLQQSGPGLVKPSQTLSLTCAISGDSVSSNSAAWNWIRQSPSRGLEWLGRTYYRSKWYSFYAISLKSRIIINPDTSKNQFSLQLKSVTPEDTAVYYCARSSPEGLFLYWFDPWGQGTLVTVSSGGDGSGGGGSGGGGSSSELTQDPAVSVALGQTIRITCQGDSLGNYYATWYQQKPGQAPVLVIYGTNNRPSGIPDRFSASSSGNTASLTITGAQAEDEADYYCNSRDSSGHHLLFGTGTKVTVLTTTPAPRPPTPAPTIASQPLSLRPEACRPAAGGAVHTRGLDFACDIYIWAPLAGTCGVLLLSLVITLYCKRGRKKLLYIFKQPFMRPVQTTQEEDGCSCRFPEEEEGGCELRVKFSRSADAPAYKQGQNQLYNELNLGRREEYDVLDKRRGRDPEMGGKPRRKNPQEGLYNELQKDKMAEAYSEIGMKGERRRGKGHDGLYQGLSTATKDTYDALHMQALPPR

SEQ ID NO: 431 - DNA, 1476 bp, Artificial Sequence
  source: /note="Description of Artificial Sequence: Synthetic polynucleotide"
atggccctccctgtcaccgccctgctgcttccgctggctcttctgctccacgccgctcggcccgaagtgcagctccaacagtcaggaccggggctcgtgaagccatcccagaccctgtccctgacttgtgccatctcgggagatagcgtgtcatcgaactccgccgcctggaactggattcggcagagcccgtcccgcggactggagtggcttggaaggacctactaccggtccaagtggtactctttctacgcgatctcgctgaagtcccgcattatcattaaccctgatacctccaagaatcagttctccctccaactgaaatccgtcacccccgaggacacagcagtgtattactgcgcacggagcagccccgaaggactgttcctgtattggtttgacccctggggccaggggactcttgtgaccgtgtcgagcggcggagatgggtccggtggcggtggttcggggggcggcggatcatcatccgaactgacccaggacccggctgtgtccgtggcgctgggacaaaccatccgcattacgtgccagggagactccctgggcaactactacgccacttggtaccagcagaagccgggccaagcccctgtgttggtcatctacgggaccaacaacagaccttccggcatccccgaccggttcagcgcttcgtcctccggcaacactgccagcctgaccatcactggagcgcaggccgaagatgaggccgactactactgcaacagcagagactcctcgggtcatcacctcttgttcggaactggaaccaaggtcaccgtgctgaccactaccccagcaccgaggccacccaccccggctcctaccatcgcctcccagcctctgtccctgcgtccggaggcatgtagacccgcagctggtggggccgtgcatacccggggtcttgacttcgcctgcgatatctacatttgggcccctctggctggtacttgcggggtcctgctgctttcactcgtgatcactctttactgtaagcgcggtcggaagaagctgctgtacatctttaagcaacccttcatgaggcctgtgcagactactcaagaggaggacggctgttcatgccggttcccagaggaggaggaaggcggctgcgaactgcgcgtgaaattcagccgcagcgcagatgctccagcctacaagcaggggcagaaccagctctacaacgaactcaatcttggtcggagagaggagtacgacgtgctggacaagcggagaggacgggacccagaaatgggcgggaagccgcgcagaaagaatccccaagagggcctgtacaacgagctccaaaaggataagatggcagaagcctatagcgagattggtatgaaaggggaacgcagaagaggcaaaggccacgacggactgtaccagggactcagcaccgccaccaaggacacctatgacgctcttcacatgcaggccctgccgcctcgg

SEQ ID NO: 432 - protein, 246 aa, Artificial Sequence
  source: /note="Description of Artificial Sequence: Synthetic polypeptide"
EVQLVESGGGLVQPGGSLRLSCAASGFTFSSYAMSWVRQAPGKGLEWVSAISGSGGSTYYADSVKGRFTISRDNSKNTLYLQMNSLRAEDTAVYYCAKVEGSGSLDYWGQGTLVTVSSGGGGSGGGGSGGGGSEIVMTQSPGTLSLSPGERATLSCRASQSVSSAYLAWYQQKPGQPPRLLISGASTRATGIPDRFGGSGSGTDFTLTISRLEPEDFAVYYCQHYGSSFNGSSLFTFGQGTRLEIK

SEQ ID NO: 433 - DNA, 738 bp, Artificial Sequence
  source: /note="Description of Artificial Sequence: Synthetic polynucleotide"
gaagtgcagctcgtggagtcaggaggcggcctggtccagccgggagggtcccttagactgtcatgcgccgcaagcggattcactttctcctcctatgccatgagctgggtccgccaagcccccggaaagggactggaatgggtgtccgccatctcggggtctggaggctcaacttactacgctgactccgtgaagggacggttcaccattagccgcgacaactccaagaacaccctctacctccaaatgaactccctgcgggccgaggataccgccgtctactactgcgccaaagtggaaggttcaggatcgctggactactggggacagggtactctcgtgaccgtgtcatcgggcggaggaggttccggcggtggcggctccggcggcggagggtcggagatcgtgatgacccagagccctggtactctgagcctttcgccgggagaaagggccaccctgtcctgccgcgcttcccaatccgtgtcctccgcgtacttggcgtggtaccagcagaagccgggacagccccctcggctgctgatcagcggggccagcacccgggcaaccggaatcccagacagattcgggggttccggcagcggcacagatttcaccctgactatttcgaggttggagcccgaggactttgcggtgtattactgtcagcactacgggtcgtcctttaatggctccagcctgttcacgttcggacaggggacccgcctggaaatcaag

SEQ ID NO: 434 - protein, 118 aa, Artificial Sequence
  source: /note="Description of Artificial Sequence: Synthetic polypeptide"
EVQLVESGGGLVQPGGSLRLSCAASGFTFSSYAMSWVRQAPGKGLEWVSAISGSGGSTYYADSVKGRFTISRDNSKNTLYLQMNSLRAEDTAVYYCAKVEGSGSLDYWGQGTLVTVSS

SEQ ID NO: 435 - protein, 113 aa, Artificial Sequence
  source: /note="Description of Artificial Sequence: Synthetic polypeptide"
EIVMTQSPGTLSLSPGERATLSCRASQSVSSAYLAWYQQKPGQPPRLLISGASTRATGIPDRFGGSGSGTDFTLTISRLEPEDFAVYYCQHYGSSFNGSSLFTFGQGTRLEIK

SEQ ID NO: 436 - protein, 490 aa, Artificial Sequence
  source: /note="Description of Artificial Sequence: Synthetic polypeptide"
MALPVTALLLPLALLLHAARPEVQLVESGGGLVQPGGSLRLSCAASGFTFSSYAMSWVRQAPGKGLEWVSAISGSGGSTYYADSVKGRFTISRDNSKNTLYLQMNSLRAEDTAVYYCAKVEGSGSLDYWGQGTLVTVSSGGGGSGGGGSGGGGSEIVMTQSPGTLSLSPGERATLSCRASQSVSSAYLAWYQQKPGQPPRLLISGASTRATGIPDRFGGSGSGTDFTLTISRLEPEDFAVYYCQHYGSSFNGSSLFTFGQGTRLEIKTTTPAPRPPTPAPTIASQPLSLRPEACRPAAGGAVHTRGLDFACDIYIWAPLAGTCGVLLLSLVITLYCKRGRKKLLYIFKQPFMRPVQTTQEEDGCSCRFPEEEEGGCELRVKFSRSADAPAYKQGQNQLYNELNLGRREEYDVLDKRRGRDPEMGGKPRRKNPQEGLYNELQKDKMAEAYSEIGMKGERRRGKGHDGLYQGLSTATKDTYDALHMQALPPR

SEQ ID NO: 437 - DNA, 1470 bp, Artificial Sequence
  source: /note="Description of Artificial Sequence: Synthetic polynucleotide"
atggccctccctgtcaccgccctgctgcttccgctggctcttctgctccacgccgctcggcccgaagtgcagctcgtggagtcaggaggcggcctggtccagccgggagggtcccttagactgtcatgcgccgcaagcggattcactttctcctcctatgccatgagctgggtccgccaagcccccggaaagggactggaatgggtgtccgccatctcggggtctggaggctcaacttactacgctgactccgtgaagggacggttcaccattagccgcgacaactccaagaacaccctctacctccaaatgaactccctgcgggccgaggataccgccgtctactactgcgccaaagtggaaggttcaggatcgctggactactggggacagggtactctcgtgaccgtgtcatcgggcggaggaggttccggcggtggcggctccggcggcggagggtcggagatcgtgatgacccagagccctggtactctgagcctttcgccgggagaaagggccaccctgtcctgccgcgcttcccaatccgtgtcctccgcgtacttggcgtggtaccagcagaagccgggacagccccctcggctgctgatcagcggggccagcacccgggcaaccggaatcccagacagattcgggggttccggcagcggcacagatttcaccctgactatttcgaggttggagcccgaggactttgcggtgtattactgtcagcactacgggtcgtcctttaatggctccagcctgttcacgttcggacaggggacccgcctggaaatcaagaccactaccccagcaccgaggccacccaccccggctcctaccatcgcctcccagcctctgtccctgcgtccggaggcatgtagacccgcagctggtggggccgtgcatacccggggtcttgacttcgcctgcgatatctacatttgggcccctctggctggtacttgcggggtcctgctgctttcactcgtgatcactctttactgtaagcgcggtcggaagaagctgctgtacatctttaagcaacccttcatgaggcctgtgcagactactcaagaggaggacggctgttcatgccggttcccagaggaggaggaaggcggctgcgaactgcgcgtgaaattcagccgcagcgcagatgctccagcctacaagcaggggcagaaccagctctacaacgaactcaatcttggtcggagagaggagtacgacgtgctggacaagcggagaggacgggacccagaaatgggcgggaagccgcgcagaaagaatccccaagagggcctgtacaacgagctccaaaaggataagatggcagaagcctatagcgagattggtatgaaaggggaacgcagaagaggcaaaggccacgacggactgtaccagggactcagcaccgccaccaaggacacctatgacgctcttcacatgcaggccctgccgcctcgg

SEQ ID NO: 438 - protein, 241 aa, Artificial Sequence
  source: /note="Description of Artificial Sequence: Synthetic polypeptide"
EVQLVETGGGLVQPGGSLRLSCAASGITFSRYPMSWVRQAPGKGLEWVSGISDSGVSTYYADSAKGRFTISRDNSKNTLFLQMSSLRDEDTAVYYCVTRAGSEASDIWGQGTMVTVSSGGGGSGGGGSGGGGSEIVLTQSPATLSLSPGERATLSCRASQSVSNSLAWYQQKPGQAPRLLIYDASSRATGIPDRFSGSGSGTDFTLTISRLEPEDFAIYYCQQFGTSSGLTFGGGTKLEIK

SEQ ID NO: 439 - DNA, 723 bp, Artificial Sequence
  source: /note="Description of Artificial Sequence: Synthetic polynucleotide"
gaagtgcaactggtggaaaccggtggcggcctggtgcagcctggaggatcattgaggctgtcatgcgcggccagcggtattaccttctcccggtaccccatgtcctgggtcagacaggccccggggaaagggcttgaatgggtgtccgggatctcggactccggtgtcagcacttactacgccgactccgccaagggacgcttcaccatttcccgggacaactcgaagaacaccctgttcctccaaatgagctccctccgggacgaggatactgcagtgtactactgcgtgacccgcgccgggtccgaggcgtctgacatttggggacagggcactatggtcaccgtgtcgtccggcggagggggctcgggaggcggtggcagcggaggaggagggtccgagatcgtgctgacccaatccccggccaccctctcgctgagccctggagaaagggcaaccttgtcctgtcgcgcgagccagtccgtgagcaactccctggcctggtaccagcagaagcccggacaggctccgagacttctgatctacgacgcttcgagccgggccactggaatccccgaccgcttttcggggtccggctcaggaaccgatttcaccctgacaatctcacggctggagccagaggatttcgccatctattactgccagcagttcggtacttcctccggcctgactttcggaggcggcacgaagctcgaaatcaag

SEQ ID NO: 440 - protein, 118 aa, Artificial Sequence
  source: /note="Description of Artificial Sequence: Synthetic polypeptide"
EVQLVETGGGLVQPGGSLRLSCAASGITFSRYPMSWVRQAPGKGLEWVSGISDSGVSTYYADSAKGRFTISRDNSKNTLFLQMSSLRDEDTAVYYCVTRAGSEASDIWGQGTMVTVSS

SEQ ID NO: 441 - protein, 108 aa, Artificial Sequence
  source: /note="Description of Artificial Sequence: Synthetic polypeptide"
EIVLTQSPATLSLSPGERATLSCRASQSVSNSLAWYQQKPGQAPRLLIYDASSRATGIPDRFSGSGSGTDFTLTISRLEPEDFAIYYCQQFGTSSGLTFGGGTKLEIK

SEQ ID NO: 442 - protein, 485 aa, Artificial Sequence
  source: /note="Description of Artificial Sequence: Synthetic polypeptide"
MALPVTALLLPLALLLHAARPEVQLVETGGGLVQPGGSLRLSCAASGITFSRYPMSWVRQAPGKGLEWVSGISDSGVSTYYADSAKGRFTISRDNSKNTLFLQMSSLRDEDTAVYYCVTRAGSEASDIWGQGTMVTVSSGGGGSGGGGSGGGGSEIVLTQSPATLSLSPGERATLSCRASQSVSNSLAWYQQKPGQAPRLLIYDASSRATGIPDRFSGSGSGTDFTLTISRLEPEDFAIYYCQQFGTSSGLTFGGGTKLEIKTTTPAPRPPTPAPTIASQPLSLRPEACRPAAGGAVHTRGLDFACDIYIWAPLAGTCGVLLLSLVITLYCKRGRKKLLYIFKQPFMRPVQTTQEEDGCSCRFPEEEEGGCELRVKFSRSADAPAYKQGQNQLYNELNLGRREEYDVLDKRRGRDPEMGGKPRRKNPQEGLYNELQKDKMAEAYSEIGMKGERRRGKGHDGLYQGLSTATKDTYDALHMQALPPR

SEQ ID NO: 443 - DNA, 1455 bp, Artificial Sequence
  source: /note="Description of Artificial Sequence: Synthetic polynucleotide"
atggccctccctgtcaccgccctgctgcttccgctggctcttctgctccacgccgctcggcccgaagtgcaactggtggaaaccggtggcggcctggtgcagcctggaggatcattgaggctgtcatgcgcggccagcggtattaccttctcccggtaccccatgtcctgggtcagacaggccccggggaaagggcttgaatgggtgtccgggatctcggactccggtgtcagcacttactacgccgactccgccaagggacgcttcaccatttcccgggacaactcgaagaacaccctgttcctccaaatgagctccctccgggacgaggatactgcagtgtactactgcgtgacccgcgccgggtccgaggcgtctgacatttggggacagggcactatggtcaccgtgtcgtccggcggagggggctcgggaggcggtggcagcggaggaggagggtccgagatcgtgctgacccaatccccggccaccctctcgctgagccctggagaaagggcaaccttgtcctgtcgcgcgagccagtccgtgagcaactccctggcctggtaccagcagaagcccggacaggctccgagacttctgatctacgacgcttcgagccgggccactggaatccccgaccgcttttcggggtccggctcaggaaccgatttcaccctgacaatctcacggctggagccagaggatttcgccatctattactgccagcagttcggtacttcctccggcctgactttcggaggcggcacgaagctcgaaatcaagaccactaccccagcaccgaggccacccaccccggctcctaccatcgcctcccagcctctgtccctgcgtccggaggcatgtagacccgcagctggtggggccgtgcatacccggggtcttgacttcgcctgcgatatctacatttgggcccctctggctggtacttgcggggtcctgctgctttcactcgtgatcactctttactgtaagcgcggtcggaagaagctgctgtacatctttaagcaacccttcatgaggcctgtgcagactactcaagaggaggacggctgttcatgccggttcccagaggaggaggaaggcggctgcgaactgcgcgtgaaattcagccgcagcgcagatgctccagcctacaagcaggggcagaaccagctctacaacgaactcaatcttggtcggagagaggagtacgacgtgctggacaagcggagaggacgggacccagaaatgggcgggaagccgcgcagaaagaatccccaagagggcctgtacaacgagctccaaaaggataagatggcagaagcctatagcgagattggtatgaaaggggaacgcagaagaggcaaaggccacgacggactgtaccagggactcagcaccgccaccaaggacacctatgacgctcttcacatgcaggccctgccgcctcgg

SEQ ID NO: 444 - protein, 248 aa, Artificial Sequence
  source: /note="Description of Artificial Sequence: Synthetic polypeptide"
QVQLVESGGGLVQPGGSLRLSCAASGFTFSSYAMSWVRQAPGKGLEWVSAISGSGGSTYYADSVKGRFTISRDNAKNSLYLQMNSLRAEDTAIYYCARATYKRELRYYYGMDVWGQGTMVTVSSGGGGSGGGGSGGGGSEIVMTQSPGTVSLSPGERATLSCRASQSVSSSFLAWYQQKPGQAPRLLIYGASSRATGIPDRFSGSGSGTDFTLTISRLEPEDSAVYYCQQYHSSPSWTFGQGTRLEIK

SEQ ID NO: 445 - DNA, 744 bp, Artificial Sequence
  source: /note="Description of Artificial Sequence: Synthetic polynucleotide"
caagtgcagctcgtggaatcgggtggcggactggtgcagccggggggctcacttagactgtcctgcgcggccagcggattcactttctcctcctacgccatgtcctgggtcagacaggcccctggaaagggcctggaatgggtgtccgcaatcagcggcagcggcggctcgacctattacgcggattcagtgaagggcagattcaccatttcccgggacaacgccaagaactccttgtaccttcaaatgaactccctccgcgcggaagataccgcaatctactactgcgctcgggccacttacaagagggaactgcgctactactacgggatggacgtctggggccagggaaccatggtcaccgtgtccagcggaggaggaggatcgggaggaggcggtagcgggggtggagggtcggagatcgtgatgacccagtcccccggcactgtgtcgctgtcccccggcgaacgggccaccctgtcatgtcgggccagccagtcagtgtcgtcaagcttcctcgcctggtaccagcagaaaccgggacaagctccccgcctgctgatctacggagccagcagccgggccaccggtattcctgaccggttctccggttcggggtccgggaccgactttactctgactatctctcgcctcgagccagaggactccgccgtgtattactgccagcagtaccactcctccccgtcctggacgttcggacagggcacaaggctggagattaag

SEQ ID NO: 446 - protein, 124 aa, Artificial Sequence
  source: /note="Description of Artificial Sequence: Synthetic polypeptide"
QVQLVESGGGLVQPGGSLRLSCAASGFTFSSYAMSWVRQAPGKGLEWVSAISGSGGSTYYADSVKGRFTISRDNAKNSLYLQMNSLRAEDTAIYYCARATYKRELRYYYGMDVWGQGTMVTVSS

SEQ ID NO: 447 - protein, 109 aa, Artificial Sequence
  source: /note="Description of Artificial Sequence: Synthetic polypeptide"
EIVMTQSPGTVSLSPGERATLSCRASQSVSSSFLAWYQQKPGQAPRLLIYGASSRATGIPDRFSGSGSGTDFTLTISRLEPEDSAVYYCQQYHSSPSWTFGQGTRLEIK

SEQ ID NO: 448 - protein, 492 aa, Artificial Sequence
  source: /note="Description of Artificial Sequence: Synthetic polypeptide"
MALPVTALLLPLALLLHAARPQVQLVESGGGLVQPGGSLRLSCAASGFTFSSYAMSWVRQAPGKGLEWVSAISGSGGSTYYADSVKGRFTISRDNAKNSLYLQMNSLRAEDTAIYYCARATYKRELRYYYGMDVWGQGTMVTVSSGGGGSGGGGSGGGGSEIVMTQSPGTVSLSPGERATLSCRASQSVSSSFLAWYQQKPGQAPRLLIYGASSRATGIPDRFSGSGSGTDFTLTISRLEPEDSAVYYCQQYHSSPSWTFGQGTRLEIKTTTPAPRPPTPAPTIASQPLSLRPEACRPAAGGAVHTRGLDFACDIYIWAPLAGTCGVLLLSLVITLYCKRGRKKLLYIFKQPFMRPVQTTQEEDGCSCRFPEEEEGGCELRVKFSRSADAPAYKQGQNQLYNELNLGRREEYDVLDKRRGRDPEMGGKPRRKNPQEGLYNELQKDKMAEAYSEIGMKGERRRGKGHDGLYQGLSTATKDTYDALHMQALPPR

SEQ ID NO: 449 - DNA, 1476 bp, Artificial Sequence
  source: /note="Description of Artificial Sequence: Synthetic polynucleotide"
atggccctccctgtcaccgccctgctgcttccgctggctcttctgctccacgccgctcggccccaagtgcagctcgtggaatcgggtggcggactggtgcagccggggggctcacttagactgtcctgcgcggccagcggattcactttctcctcctacgccatgtcctgggtcagacaggcccctggaaagggcctggaatgggtgtccgcaatcagcggcagcggcggctcgacctattacgcggattcagtgaagggcagattcaccatttcccgggacaacgccaagaactccttgtaccttcaaatgaactccctccgcgcggaagataccgcaatctactactgcgctcgggccacttacaagagggaactgcgctactactacgggatggacgtctggggccagggaaccatggtcaccgtgtccagcggaggaggaggatcgggaggaggcggtagcgggggtggagggtcggagatcgtgatgacccagtcccccggcactgtgtcgctgtcccccggcgaacgggccaccctgtcatgtcgggccagccagtcagtgtcgtcaagcttcctcgcctggtaccagcagaaaccgggacaagctccccgcctgctgatctacggagccagcagccgggccaccggtattcctgaccggttctccggttcggggtccgggaccgactttactctgactatctctcgcctcgagccagaggactccgccgtgtattactgccagcagtaccactcctccccgtcctggacgttcggacagggcacaaggctggagattaagaccactaccccagcaccgaggccacccaccccggctcctaccatcgcctcccagcctctgtccctgcgtccggaggcatgtagacccgcagctggtggggccgtgcatacccggggtcttgacttcgcctgcgatatctacatttgggcccctctggctggtacttgcggggtcctgctgctttcactcgtgatcactctttactgtaagcgcggtcggaagaagctgctgtacatctttaagcaacccttcatgaggcctgtgcagactactcaagaggaggacggctgttcatgccggttcccagaggaggaggaaggcggctgcgaactgcgcgtgaaattcagccgcagcgcagatgctccagcctacaagcaggggcagaaccagctctacaacgaactcaatcttggtcggagagaggagtacgacgtgctggacaagcggagaggacgggacccagaaatgggcgggaagccgcgcagaaagaatccccaagagggcctgtacaacgagctccaaaaggataagatggcagaagcctatagcgagattggtatgaaaggggaacgcagaagaggcaaaggccacgacggactgtaccagggactcagcaccgccaccaaggacacctatgacgctcttcacatgcaggccctgccgcctcgg

SEQ ID NO: 450 - protein, 248 aa, Artificial Sequence
  source: /note="Description of Artificial Sequence: Synthetic polypeptide"
EVQLVETGGGLVQPGGSLRLSCAASGFTFSSYAMSWVRQAPGKGLEWVSAISGSGGSTYYADSVKGRFTISRDNSKNTLYLQMNTLKAEDTAVYYCARATYKRELRYYYGMDVWGQGTTVTVSSGGGGSGGGGSGGGGSEIVLTQSPSTLSLSPGESATLSCRASQSVSTTFLAWYQQKPGQAPRLLIYGSSNRATGIPDRFSGSGSGTDFTLTIRRLEPEDFAVYYCQQYHSSPSWTFGQGTKVEIK

SEQ ID NO: 451 - DNA, 744 bp, Artificial Sequence
  source: /note="Description of Artificial Sequence: Synthetic polynucleotide"
gaggtgcagcttgtggaaaccggtggcggactggtgcagcccggaggaagcctcaggctgtcctgcgccgcgtccggcttcaccttctcctcgtacgccatgtcctgggtccgccaggcccccggaaagggcctggaatgggtgtccgccatctctggaagcggaggttccacgtactacgcggacagcgtcaagggaaggttcacaatctcccgcgataattcgaagaacactctgtaccttcaaatgaacaccctgaaggccgaggacactgctgtgtactactgcgcacgggccacctacaagagagagctccggtactactacggaatggacgtctggggccagggaactactgtgaccgtgtcctcgggagggggtggctccggggggggcggctccggcggaggcggttccgagattgtgctgacccagtcaccttcaactctgtcgctgtccccgggagagagcgctactctgagctgccgggccagccagtccgtgtccaccaccttcctcgcctggtatcagcagaagccggggcaggcaccacggctcttgatctacgggtcaagcaacagagcgaccggaattcctgaccgcttctcggggagcggttcaggcaccgacttcaccctgactatccggcgcctggaacccgaagatttcgccgtgtattactgtcaacagtaccactcctcgccgtcctggacctttggccaaggaaccaaagtggaaatcaag

SEQ ID NO: 452 - protein, 124 aa, Artificial Sequence
  source: /note="Description of Artificial Sequence: Synthetic polypeptide"
EVQLVETGGGLVQPGGSLRLSCAASGFTFSSYAMSWVRQAPGKGLEWVSAISGSGGSTYYADSVKGRFTISRDNSKNTLYLQMNTLKAEDTAVYYCARATYKRELRYYYGMDVWGQGTTVTVSS

SEQ ID NO: 453 - protein, 109 aa, Artificial Sequence
  source: /note="Description of Artificial Sequence: Synthetic polypeptide"
EIVLTQSPSTLSLSPGESATLSCRASQSVSTTFLAWYQQKPGQAPRLLIYGSSNRATGIPDRFSGSGSGTDFTLTIRRLEPEDFAVYYCQQYHSSPSWTFGQGTKVEIK

SEQ ID NO: 454 - protein, 492 aa, Artificial Sequence
  source: /note="Description of Artificial Sequence: Synthetic polypeptide"
MALPVTALLLPLALLLHAARPEVQLVETGGGLVQPGGSLRLSCAASGFTFSSYAMSWVRQAPGKGLEWVSAISGSGGSTYYADSVKGRFTISRDNSKNTLYLQMNTLKAEDTAVYYCARATYKRELRYYYGMDVWGQGTTVTVSSGGGGSGGGGSGGGGSEIVLTQSPSTLSLSPGESATLSCRASQSVSTTFLAWYQQKPGQAPRLLIYGSSNRATGIPDRFSGSGSGTDFTLTIRRLEPEDFAVYYCQQYHSSPSWTFGQGTKVEIKTTTPAPRPPTPAPTIASQPLSLRPEACRPAAGGAVHTRGLDFACDIYIWAPLAGTCGVLLLSLVITLYCKRGRKKLLYIFKQPFMRPVQTTQEEDGCSCRFPEEEEGGCELRVKFSRSADAPAYKQGQNQLYNELNLGRREEYDVLDKRRGRDPEMGGKPRRKNPQEGLYNELQKDKMAEAYSEIGMKGERRRGKGHDGLYQGLSTATKDTYDALHMQALPPR

SEQ ID NO: 455 - DNA, 1476 bp, Artificial Sequence
  source: /note="Description of Artificial Sequence: Synthetic polynucleotide"
atggccctccctgtcaccgccctgctgcttccgctggctcttctgctccacgccgctcggcccgaggtgcagcttgtggaaaccggtggcggactggtgcagcccggaggaagcctcaggctgtcctgcgccgcgtccggcttcaccttctcctcgtacgccatgtcctgggtccgccaggcccccggaaagggcctggaatgggtgtccgccatctctggaagcggaggttccacgtactacgcggacagcgtcaagggaaggttcacaatctcccgcgataattcgaagaacactctgtaccttcaaatgaacaccctgaaggccgaggacactgctgtgtactactgcgcacgggccacctacaagagagagctccggtactactacggaatggacgtctggggccagggaactactgtgaccgtgtcctcgggagggggtggctccggggggggcggctccggcggaggcggttccgagattgtgctgacccagtcaccttcaactctgtcgctgtccccgggagagagcgctactctgagctgccgggccagccagtccgtgtccaccaccttcctcgcctggtatcagcagaagccggggcaggcaccacggctcttgatctacgggtcaagcaacagagcgaccggaattcctgaccgcttctcggggagcggttcaggcaccgacttcaccctgactatccggcgcctggaacccgaagatttcgccgtgtattactgtcaacagtaccactcctcgccgtcctggacctttggccaaggaaccaaagtggaaatcaagaccactaccccagcaccgaggccacccaccccggctcctaccatcgcctcccagcctctgtccctgcgtccggaggcatgtagacccgcagctggtggggccgtgcatacccggggtcttgacttcgcctgcgatatctacatttgggcccctctggctggtacttgcggggtcctgctgctttcactcgtgatcactctttactgtaagcgcggtcggaagaagctgctgtacatctttaagcaacccttcatgaggcctgtgcagactactcaagaggaggacggctgttcatgccggttcccagaggaggaggaaggcggctgcgaactgcgcgtgaaattcagccgcagcgcagatgctccagcctacaagcaggggcagaaccagctctacaacgaactcaatcttggtcggagagaggagtacgacgtgctggacaagcggagaggacgggacccagaaatgggcgggaagccgcgcagaaagaatccccaagagggcctgtacaacgagctccaaaaggataagatggcagaagcctatagcgagattggtatgaaaggggaacgcagaagaggcaaaggccacgacggactgtaccagggactcagcaccgccaccaaggacacctatgacgctcttcacatgcaggccctgccgcctcgg

SEQ ID NO: 456 - protein, 239 aa, Artificial Sequence
  source: /note="Description of Artificial Sequence: Synthetic polypeptide"
EVQLVETGGGLVQPGRSLRLSCAASGFTFDDYAMHWVRQAPGKGLEWVSGISWNSGSIGYADSVKGRFTISRDNAKNSLYLQMNSLRDEDTAVYYCARVGKAVPDVWGQGTTVTVSSGGGGSGGGGSGGGGSDIVMTQTPSSLSASVGDRVTITCRASQSISSYLNWYQQKPGKAPKLLIYAASSLQSGVPSRFSGSGSGTDFTLTISSLQPEDFATYYCQQSYSTPYSFGQGTRLEIK

SEQ ID NO: 457 - DNA, 717 bp, Artificial Sequence
  source: /note="Description of Artificial Sequence: Synthetic polynucleotide"
gaagtgcagctcgtggaaactggaggtggactcgtgcagcctggacggtcgctgcggctgagctgcgctgcatccggcttcaccttcgacgattatgccatgcactgggtcagacaggcgccagggaagggacttgagtgggtgtccggtatcagctggaatagcggctcaatcggatacgcggactccgtgaagggaaggttcaccatttcccgcgacaacgccaagaactccctgtacttgcaaatgaacagcctccgggatgaggacactgccgtgtactactgcgcccgcgtcggaaaagctgtgcccgacgtctggggccagggaaccactgtgaccgtgtccagcggcgggggtggatcgggcggtggagggtccggtggagggggctcagatattgtgatgacccagaccccctcgtccctgtccgcctcggtcggcgaccgcgtgactatcacatgtagagcctcgcagagcatctccagctacctgaactggtatcagcagaagccggggaaggccccgaagctcctgatctacgcggcatcatcactgcaatcgggagtgccgagccggttttccgggtccggctccggcaccgacttcacgctgaccatttcttccctgcaacccgaggacttcgccacttactactgccagcagtcctactccaccccttactccttcggccaaggaaccaggctggaaatcaag

SEQ ID NO: 458 - protein, 117 aa, Artificial Sequence
  source: /note="Description of Artificial Sequence: Synthetic polypeptide"
EVQLVETGGGLVQPGRSLRLSCAASGFTFDDYAMHWVRQAPGKGLEWVSGISWNSGSIGYADSVKGRFTISRDNAKNSLYLQMNSLRDEDTAVYYCARVGKAVPDVWGQGTTVTVSS

SEQ ID NO: 459 - protein, 107 aa, Artificial Sequence
  source: /note="Description of Artificial Sequence: Synthetic polypeptide"
DIVMTQTPSSLSASVGDRVTITCRASQSISSYLNWYQQKPGKAPKLLIYAASSLQSGVPSRFSGSGSGTDFTLTISSLQPEDFATYYCQQSYSTPYSFGQGTRLEIK

SEQ ID NO: 460 - protein, 483 aa, Artificial Sequence
  source: /note="Description of Artificial Sequence: Synthetic polypeptide"
MALPVTALLLPLALLLHAARPEVQLVETGGGLVQPGRSLRLSCAASGFTFDDYAMHWVRQAPGKGLEWVSGISWNSGSIGYADSVKGRFTISRDNAKNSLYLQMNSLRDEDTAVYYCARVGKAVPDVWGQGTTVTVSSGGGGSGGGGSGGGGSDIVMTQTPSSLSASVGDRVTITCRASQSISSYLNWYQQKPGKAPKLLIYAASSLQSGVPSRFSGSGSGTDFTLTISSLQPEDFATYYCQQSYSTPYSFGQGTRLEIKTTTPAPRPPTPAPTIASQPLSLRPEACRPAAGGAVHTRGLDFACDIYIWAPLAGTCGVLLLSLVITLYCKRGRKKLLYIFKQPFMRPVQTTQEEDGCSCRFPEEEEGGCELRVKFSRSADAPAYKQGQNQLYNELNLGRREEYDVLDKRRGRDPEMGGKPRRKNPQEGLYNELQKDKMAEAYSEIGMKGERRRGKGHDGLYQGLSTATKDTYDALHMQALPPR

SEQ ID NO: 461 - DNA, 1449 bp, Artificial Sequence
  source: /note="Description of Artificial Sequence: Synthetic polynucleotide"
atggccctccctgtcaccgccctgctgcttccgctggctcttctgctccacgccgctcggcccgaagtgcagctcgtggaaactggaggtggactcgtgcagcctggacggtcgctgcggctgagctgcgctgcatccggcttcaccttcgacgattatgccatgcactgggtcagacaggcgccagggaagggacttgagtgggtgtccggtatcagctggaatagcggctcaatcggatacgcggactccgtgaagggaaggttcaccatttcccgcgacaacgccaagaactccctgtacttgcaaatgaacagcctccgggatgaggacactgccgtgtactactgcgcccgcgtcggaaaagctgtgcccgacgtctggggccagggaaccactgtgaccgtgtccagcggcgggggtggatcgggcggtggagggtccggtggagggggctcagatattgtgatgacccagaccccctcgtccctgtccgcctcggtcggcgaccgcgtgactatcacatgtagagcctcgcagagcatctccagctacctgaactggtatcagcagaagccggggaaggccccgaagctcctgatctacgcggcatcatcactgcaatcgggagtgccgagccggttttccgggtccggctccggcaccgacttcacgctgaccatttcttccctgcaacccgaggacttcgccacttactactgccagcagtcctactccaccccttactccttcggccaaggaaccaggctggaaatcaagaccactaccccagcaccgaggccacccaccccggctcctaccatcgcctcccagcctctgtccctgcgtccggaggcatgtagacccgcagctggtggggccgtgcatacccggggtcttgacttcgcctgcgatatctacatttgggcccctctggctggtacttgcggggtcctgctgctttcactcgtgatcactctttactgtaagcgcggtcggaagaagctgctgtacatctttaagcaacccttcatgaggcctgtgcagactactcaagaggaggacggctgttcatgccggttcccagaggaggaggaaggcggctgcgaactgcgcgtgaaattcagccgcagcgcagatgctccagcctacaagcaggggcagaaccagctctacaacgaactcaatcttggtcggagagaggagtacgacgtgctggacaagcggagaggacgggacccagaaatgggcgggaagccgcgcagaaagaatccccaagagggcctgtacaacgagctccaaaaggataagatggcagaagcctatagcgagattggtatgaaaggggaacgcagaagaggcaaaggccacgacggactgtaccagggactcagcaccgccaccaaggacacctatgacgctcttcacatgcaggccctgccgcctcgg

SEQ ID NO: 462 - protein, 246 aa, Artificial Sequence
  source: /note="Description of Artificial Sequence: Synthetic polypeptide"
EVQLVESGGGLVQPGRSLRLSCTASGFTFDDYAMHWVRQRPGKGLEWVASINWKGNSLAYGDSVKGRFAISRDNAKNTVFLQMNSLRTEDTAVYYCASHQGVAYYNYAMDVWGRGTLVTVSSGGGGSGGGGSGGGGSEIVLTQSPGTLSLSPGERATLSCRATQSIGSSFLAWYQQRPGQAPRLLIYGASQRATGIPDRFSGRGSGTDFTLTISRVEPEDSAVYYCQHYESSPSWTFGQGTKVEIK

SEQ ID NO: 463 - DNA, 738 bp, Artificial Sequence
  source: /note="Description of Artificial Sequence: Synthetic polynucleotide"
gaagtgcagctcgtggagagcgggggaggattggtgcagcccggaaggtccctgcggctctcctgcactgcgtctggcttcaccttcgacgactacgcgatgcactgggtcagacagcgcccgggaaagggcctggaatgggtcgcctcaatcaactggaagggaaactccctggcctatggcgacagcgtgaagggccgcttcgccatttcgcgcgacaacgccaagaacaccgtgtttctgcaaatgaattccctgcggaccgaggataccgctgtgtactactgcgccagccaccagggcgtggcatactataactacgccatggacgtgtggggaagagggacgctcgtcaccgtgtcctccgggggcggtggatcgggtggaggaggaagcggtggcgggggcagcgaaatcgtgctgactcagagcccgggaactctttcactgtccccgggagaacgggccactctctcgtgccgggccacccagtccatcggctcctccttccttgcctggtaccagcagaggccaggacaggcgccccgcctgctgatctacggtgcttcccaacgcgccactggcattcctgaccggttcagcggcagagggtcgggaaccgatttcacactgaccatttcccgggtggagcccgaagattcggcagtctactactgtcagcattacgagtcctccccttcatggaccttcggtcaagggaccaaagtggagatcaag

SEQ ID NO: 464 - protein, 122 aa, Artificial Sequence
  source: /note="Description of Artificial Sequence: Synthetic polypeptide"
EVQLVESGGGLVQPGRSLRLSCTASGFTFDDYAMHWVRQRPGKGLEWVASINWKGNSLAYGDSVKGRFAISRDNAKNTVFLQMNSLRTEDTAVYYCASHQGVAYYNYAMDVWGRGTLVTVSS

SEQ ID NO: 465 - protein, 109 aa, Artificial Sequence
  source: /note="Description of Artificial Sequence: Synthetic polypeptide"
EIVLTQSPGTLSLSPGERATLSCRATQSIGSSFLAWYQQRPGQAPRLLIYGASQRATGIPDRFSGRGSGTDFTLTISRVEPEDSAVYYCQHYESSPSWTFGQGTKVEIK

SEQ ID NO: 466 - protein, 490 aa, Artificial Sequence
  source: /note="Description of Artificial Sequence: Synthetic polypeptide"
MALPVTALLLPLALLLHAARPEVQLVESGGGLVQPGRSLRLSCTASGFTFDDYAMHWVRQRPGKGLEWVASINWKGNSLAYGDSVKGRFAISRDNAKNTVFLQMNSLRTEDTAVYYCASHQGVAYYNYAMDVWGRGTLVTVSSGGGGSGGGGSGGGGSEIVLTQSPGTLSLSPGERATLSCRATQSIGSSFLAWYQQRPGQAPRLLIYGASQRATGIPDRFSGRGSGTDFTLTISRVEPEDSAVYYCQHYESSPSWTFGQGTKVEIKTTTPAPRPPTPAPTIASQPLSLRPEACRPAAGGAVHTRGLDFACDIYIWAPLAGTCGVLLLSLVITLYCKRGRKKLLYIFKQPFMRPVQTTQEEDGCSCRFPEEEEGGCELRVKFSRSADAPAYKQGQNQLYNELNLGRREEYDVLDKRRGRDPEMGGKPRRKNPQEGLYNELQKDKMAEAYSEIGMKGERRRGKGHDGLYQGLSTATKDTYDALHMQALPPR

SEQ ID NO: 467 - DNA, 1470 bp, Artificial Sequence
  source: /note="Description of Artificial Sequence: Synthetic polynucleotide"
atggccctccctgtcaccgccctgctgcttccgctggctcttctgctccacgccgctcggcccgaagtgcagctcgtggagagcgggggaggattggtgcagcccggaaggtccctgcggctctcctgcactgcgtctggcttcaccttcgacgactacgcgatgcactgggtcagacagcgcccgggaaagggcctggaatgggtcgcctcaatcaactggaagggaaactccctggcctatggcgacagcgtgaagggccgcttcgccatttcgcgcgacaacgccaagaacaccgtgtttctgcaaatgaattccctgcggaccgaggataccgctgtgtactactgcgccagccaccagggcgtggcatactataactacgccatggacgtgtggggaagagggacgctcgtcaccgtgtcctccgggggcggtggatcgggtggaggaggaagcggtggcgggggcagcgaaatcgtgctgactcagagcccgggaactctttcactgtccccgggagaacgggccactctctcgtgccgggccacccagtccatcggctcctccttccttgcctggtaccagcagaggccaggacaggcgccccgcctgctgatctacggtgcttcccaacgcgccactggcattcctgaccggttcagcggcagagggtcgggaaccgatttcacactgaccatttcccgggtggagcccgaagattcggcagtctactactgtcagcattacgagtcctccccttcatggaccttcggtcaagggaccaaagtggagatcaagaccactaccccagcaccgaggccacccaccccggctcctaccatcgcctcccagcctctgtccctgcgtccggaggcatgtagacccgcagctggtggggccgtgcatacccggggtcttgacttcgcctgcgatatctacatttgggcccctctggctggtacttgcggggtcctgctgctttcactcgtgatcactctttactgtaagcgcggtcggaagaagctgctgtacatctttaagcaacccttcatgaggcctgtgcagactactcaagaggaggacggctgttcatgccggttcccagaggaggaggaaggcggctgcgaactgcgcgtgaaattcagccgcagcgcagatgctccagcctacaagcaggggcagaaccagctctacaacgaactcaatcttggtcggagagaggagtacgacgtgctggacaagcggagaggacgggacccagaaatgggcgggaagccgcgcagaaagaatccccaagagggcctgtacaacgagctccaaaaggataagatggcagaagcctatagcgagattggtatgaaaggggaacgcagaagaggcaaaggccacgacggactgtaccagggactcagcaccgccaccaaggacacctatgacgctcttcacatgcaggccctgccgcctcgg

SEQ ID NO: 468 - protein, 241 aa, Artificial Sequence
  source: /note="Description of Artificial Sequence: Synthetic polypeptide"
EVQLVESGGGLVQPGGSLRLSCAASGFTFSSYAMSWVRQAPGKGLEWVSAISGSGGSTYYADSVKGRFTISRDNSKNTLYLQMNSLRAEDTAVYYCAKVVRDGMDVWGQGTTVTVSSGGGGSGGGGSGGGGSEIVLTQSPATLSLSPGERATLSCRASQSVSSSYLAWYQQKPGQAPRLLIYGASSRATGIPDRFSGNGSGTDFTLTISRLEPEDFAVYYCQQYGSPPRFTFGPGTKVDIK

SEQ ID NO: 469 - DNA, 723 bp, Artificial Sequence
  source: /note="Description of Artificial Sequence: Synthetic polynucleotide"
gaggtgcagttggtcgaaagcgggggcgggcttgtgcagcctggcggatcactgcggctgtcctgcgcggcatcaggcttcacgttttcttcctacgccatgtcctgggtgcgccaggcccctggaaagggactggaatgggtgtccgcgatttcggggtccggcgggagcacctactacgccgattccgtgaagggccgcttcactatctcgcgggacaactccaagaacaccctctacctccaaatgaatagcctgcgggccgaggataccgccgtctactattgcgctaaggtcgtgcgcgacggaatggacgtgtggggacagggtaccaccgtgacagtgtcctcggggggaggcggtagcggcggaggaggaagcggtggtggaggttccgagattgtgctgactcaatcacccgcgaccctgagcctgtcccccggcgaaagggccactctgtcctgtcgggccagccaatcagtctcctcctcgtacctggcctggtaccagcagaagccaggacaggctccgagactccttatctatggcgcatcctcccgcgccaccggaatcccggataggttctcgggaaacggatcggggaccgacttcactctcaccatctcccggctggaaccggaggacttcgccgtgtactactgccagcagtacggcagcccgcctagattcactttcggccccggcaccaaagtggacatcaag

SEQ ID NO: 470 - protein, 117 aa, Artificial Sequence
  source: /note="Description of Artificial Sequence: Synthetic polypeptide"
EVQLVESGGGLVQPGGSLRLSCAASGFTFSSYAMSWVRQAPGKGLEWVSAISGSGGSTYYADSVKGRFTISRDNSKNTLYLQMNSLRAEDTAVYYCAKVVRDGMDVWGQGTTVTVSS

SEQ ID NO: 471 - protein, 109 aa, Artificial Sequence
  source: /note="Description of Artificial Sequence: Synthetic polypeptide"
EIVLTQSPATLSLSPGERATLSCRASQSVSSSYLAWYQQKPGQAPRLLIYGASSRATGIPDRFSGNGSGTDFTLTISRLEPEDFAVYYCQQYGSPPRFTFGPGTKVDIK

SEQ ID NO: 472 - protein, 485 aa, Artificial Sequence
  source: /note="Description of Artificial Sequence: Synthetic polypeptide"
MALPVTALLLPLALLLHAARPEVQLVESGGGLVQPGGSLRLSCAASGFTFSSYAMSWVRQAPGKGLEWVSAISGSGGSTYYADSVKGRFTISRDNSKNTLYLQMNSLRAEDTAVYYCAKVVRDGMDVWGQGTTVTVSSGGGGSGGGGSGGGGSEIVLTQSPATLSLSPGERATLSCRASQSVSSSYLAWYQQKPGQAPRLLIYGASSRATGIPDRFSGNGSGTDFTLTISRLEPEDFAVYYCQQYGSPPRFTFGPGTKVDIKTTTPAPRPPTPAPTIASQPLSLRPEACRPAAGGAVHTRGLDFACDIYIWAPLAGTCGVLLLSLVITLYCKRGRKKLLYIFKQPFMRPVQTTQEEDGCSCRFPEEEEGGCELRVKFSRSADAPAYKQGQNQLYNELNLGRREEYDVLDKRRGRDPEMGGKPRRKNPQEGLYNELQKDKMAEAYSEIGMKGERRRGKGHDGLYQGLSTATKDTYDALHMQALPPR

SEQ ID NO: 473 - DNA, 1455 bp, Artificial Sequence
  source: /note="Description of Artificial Sequence: Synthetic polynucleotide"
atggccctccctgtcaccgccctgctgcttccgctggctcttctgctccacgccgctcggcccgaggtgcagttggtcgaaagcgggggcgggcttgtgcagcctggcggatcactgcggctgtcctgcgcggcatcaggcttcacgttttcttcctacgccatgtcctgggtgcgccaggcccctggaaagggactggaatgggtgtccgcgatttcggggtccggcgggagcacctactacgccgattccgtgaagggccgcttcactatctcgcgggacaactccaagaacaccctctacctccaaatgaatagcctgcgggccgaggataccgccgtctactattgcgctaaggtcgtgcgcgacggaatggacgtgtggggacagggtaccaccgtgacagtgtcctcggggggaggcggtagcggcggaggaggaagcggtggtggaggttccgagattgtgctgactcaatcacccgcgaccctgagcctgtcccccggcgaaagggccactctgtcctgtcgggccagccaatcagtctcctcctcgtacctggcctggtaccagcagaagccaggacaggctccgagactccttatctatggcgcatcctcccgcgccaccggaatcccggataggttctcgggaaacggatcggggaccgacttcactctcaccatctcccggctggaaccggaggacttcgccgtgtactactgccagcagtacggcagcccgcctagattcactttcggccccggcaccaaagtggacatcaagaccactaccccagcaccgaggccacccaccccggctcctaccatcgcctcccagcctctgtccctgcgtccggaggcatgtagacccgcagctggtggggccgtgcatacccggggtcttgacttcgcctgcgatatctacatttgggcccctctggctggtacttgcggggtcctgctgctttcactcgtgatcactctttactgtaagcgcggtcggaagaagctgctgtacatctttaagcaacccttcatgaggcctgtgcagactactcaagaggaggacggctgttcatgccggttcccagaggaggaggaaggcggctgcgaactgcgcgtgaaattcagccgcagcgcagatgctccagcctacaagcaggggcagaaccagctctacaacgaactcaatcttggtcggagagaggagtacgacgtgctggacaagcggagaggacgggacccagaaatgggcgggaagccgcgcagaaagaatccccaagagggcctgtacaacgagctccaaaaggataagatggcagaagcctatagcgagattggtatgaaaggggaacgcagaagaggcaaaggccacgacggactgtaccagggactcagcaccgccaccaaggacacctatgacgctcttcacatgcaggccctgccgcctcgg

SEQ ID NO: 474 - protein, 242 aa, Artificial Sequence
  source: /note="Description of Artificial Sequence: Synthetic polypeptide"
EVQLLESGGGLVQPGGSLRLSCAASGFTFSSYAMSWVRQAPGKGLEWVSAISGSGGSTYYADSVKGRFTISRDNSKNTLYLQMNSLRAEDTAVYYCAKIPQTGTFDYWGQGTLVTVSSGGGGSGGGGSGGGGSEIVLTQSPGTLSLSPGERATLSCRASQSVSSSYLAWYQQRPGQAPRLLIYGASSRATGIPDRFSGSGSGTDFTLTISRLEPEDFAVYYCQHYGSSPSWTFGQGTRLEIK

SEQ ID NO: 475 - DNA, 726 bp, Artificial Sequence
  source: /note="Description of Artificial Sequence: Synthetic polynucleotide"
gaagtgcagctgctggagtccggcggtggattggtgcaaccggggggatcgctcagactgtcctgtgcggcgtcaggcttcaccttctcgagctacgccatgtcatgggtcagacaggcccctggaaagggtctggaatgggtgtccgccatttccgggagcgggggatctacatactacgccgatagcgtgaagggccgcttcaccatttcccgggacaactccaagaacactctctatctgcaaatgaactccctccgcgctgaggacactgccgtgtactactgcgccaaaatccctcagaccggcaccttcgactactggggacaggggactctggtcaccgtcagcagcggtggcggaggttcggggggaggaggaagcggcggcggagggtccgagattgtgctgacccagtcacccggcactttgtccctgtcgcctggagaaagggccaccctttcctgccgggcatcccaatccgtgtcctcctcgtacctggcctggtaccagcagaggcccggacaggccccacggcttctgatctacggagcaagcagccgcgcgaccggtatcccggaccggttttcgggctcgggctcaggaactgacttcaccctcaccatctcccgcctggaacccgaagatttcgctgtgtattactgccagcactacggcagctccccgtcctggacgttcggccagggaactcggctggagatcaag

SEQ ID NO: 476 - protein, 118 aa, Artificial Sequence
  source: /note="Description of Artificial Sequence: Synthetic polypeptide"
EVQLLESGGGLVQPGGSLRLSCAASGFTFSSYAMSWVRQAPGKGLEWVSAISGSGGSTYYADSVKGRFTISRDNSKNTLYLQMNSLRAEDTAVYYCAKIPQTGTFDYWGQGTLVTVSS

SEQ ID NO: 477 - protein, 109 aa, Artificial Sequence
  source: /note="Description of Artificial Sequence: Synthetic polypeptide"
EIVLTQSPGTLSLSPGERATLSCRASQSVSSSYLAWYQQRPGQAPRLLIYGASSRATGIPDRFSGSGSGTDFTLTISRLEPEDFAVYYCQHYGSSPSWTFGQGTRLEIK

SEQ ID NO: 478 - protein, 486 aa, Artificial Sequence
  source: /note="Description of Artificial Sequence: Synthetic polypeptide"
MALPVTALLLPLALLLHAARPEVQLLESGGGLVQPGGSLRLSCAASGFTFSSYAMSWVRQAPGKGLEWVSAISGSGGSTYYADSVKGRFTISRDNSKNTLYLQMNSLRAEDTAVYYCAKIPQTGTFDYWGQGTLVTVSSGGGGSGGGGSGGGGSEIVLTQSPGTLSLSPGERATLSCRASQSVSSSYLAWYQQRPGQAPRLLIYGASSRATGIPDRFSGSGSGTDFTLTISRLEPEDFAVYYCQHYGSSPSWTFGQGTRLEIKTTTPAPRPPTPAPTIASQPLSLRPEACRPAAGGAVHTRGLDFACDIYIWAPLAGTCGVLLLSLVITLYCKRGRKKLLYIFKQPFMRPVQTTQEEDGCSCRFPEEEEGGCELRVKFSRSADAPAYKQGQNQLYNELNLGRREEYDVLDKRRGRDPEMGGKPRRKNPQEGLYNELQKDKMAEAYSEIGMKGERRRGKGHDGLYQGLSTATKDTYDALHMQALPPR

SEQ ID NO: 479 - DNA, 1458 bp, Artificial Sequence
  source: /note="Description of Artificial Sequence: Synthetic polynucleotide"
atggccctccctgtcaccgccctgctgcttccgctggctcttctgctccacgccgctcggcccgaagtgcagctgctggagtccggcggtggattggtgcaaccggggggatcgctcagactgtcctgtgcggcgtcaggcttcaccttctcgagctacgccatgtcatgggtcagacaggcccctggaaagggtctggaatgggtgtccgccatttccgggagcgggggatctacatactacgccgatagcgtgaagggccgcttcaccatttcccgggacaactccaagaacactctctatctgcaaatgaactccctccgcgctgaggacactgccgtgtactactgcgccaaaatccctcagaccggcaccttcgactactggggacaggggactctggtcaccgtcagcagcggtggcggaggttcggggggaggaggaagcggcggcggagggtccgagattgtgctgacccagtcacccggcactttgtccctgtcgcctggagaaagggccaccctttcctgccgggcatcccaatccgtgtcctcctcgtacctggcctggtaccagcagaggcccggacaggccccacggcttctgatctacggagcaagcagccgcgcgaccggtatcccggaccggttttcgggctcgggctcaggaactgacttcaccctcaccatctcccgcctggaacccgaagatttcgctgtgtattactgccagcactacggcagctccccgtcctggacgttcggccagggaactcggctggagatcaagaccactaccccagcaccgaggccacccaccccggctcctaccatcgcctcccagcctctgtccctgcgtccggaggcatgtagacccgcagctggtggggccgtgcatacccggggtcttgacttcgcctgcgatatctacatttgggcccctctggctggtacttgcggggtcctgctgctttcactcgtgatcactctttactgtaagcgcggtcggaagaagctgctgtacatctttaagcaacccttcatgaggcctgtgcagactactcaagaggaggacggctgttcatgccggttcccagaggaggaggaaggcggctgcgaactgcgcgtgaaattcagccgcagcgcagatgctccagcctacaagcaggggcagaaccagctctacaacgaactcaatcttggtcggagagaggagtacgacgtgctggacaagcggagaggacgggacccagaaatgggcgggaagccgcgcagaaagaatccccaagagggcctgtacaacgagctccaaaaggataagatggcagaagcctatagcgagattggtatgaaaggggaacgcagaagaggcaaaggccacgacggactgtaccagggactcagcaccgccaccaaggacacctatgacgctcttcacatgcaggccctgccgcctcgg

SEQ ID NO: 480 - protein, 248 aa, Artificial Sequence
  source: /note="Description of Artificial Sequence: Synthetic polypeptide"
EVQLVETGGGLVQPGGSLRLSCAASGFTFSSYAMSWVRQAPGKGLEWVSAISGSGGSTYYADSVKGRFTMSRENDKNSVFLQMNSLRVEDTGVYYCARANYKRELRYYYGMDVWGQGTMVTVSSGGGGSGGGGSGGGGSEIVMTQSPGTLSLSPGESATLSCRASQRVASNYLAWYQHKPGQAPSLLISGASSRATGVPDRFSGSGSGTDFTLAISRLEPEDSAVYYCQHYDSSPSWTFGQGTKVEIK

SEQ ID NO: 481 - DNA, 744 bp, Artificial Sequence
  source: /note="Description of Artificial Sequence: Synthetic polynucleotide"
gaagtgcaactggtggaaaccggtggaggactcgtgcagcctggcggcagcctccggctgagctgcgccgcttcgggattcaccttttcctcctacgcgatgtcttgggtcagacaggcccccggaaaggggctggaatgggtgtcagccatctccggctccggcggatcaacgtactacgccgactccgtgaaaggccggttcaccatgtcgcgcgagaatgacaagaactccgtgttcctgcaaatgaactccctgagggtggaggacaccggagtgtactattgtgcgcgcgccaactacaagagagagctgcggtactactacggaatggacgtctggggacagggaactatggtgaccgtgtcatccggtggagggggaagcggcggtggaggcagcgggggcgggggttcagaaattgtcatgacccagtccccgggaactctttccctctcccccggggaatccgcgactttgtcctgccgggccagccagcgcgtggcctcgaactacctcgcatggtaccagcataagccaggccaagccccttccctgctgatttccggggctagcagccgcgccactggcgtgccggataggttctcgggaagcggctcgggtaccgatttcaccctggcaatctcgcggctggaaccggaggattcggccgtgtactactgccagcactatgactcatccccctcctggacattcggacagggcaccaaggtcgagatcaag

SEQ ID NO: 482 - protein, 124 aa, Artificial Sequence
  source: /note="Description of Artificial Sequence: Synthetic polypeptide"
EVQLVETGGGLVQPGGSLRLSCAASGFTFSSYAMSWVRQAPGKGLEWVSAISGSGGSTYYADSVKGRFTMSRENDKNSVFLQMNSLRVEDTGVYYCARANYKRELRYYYGMDVWGQGTMVTVSS

SEQ ID NO: 483 - protein, 109 aa, Artificial Sequence
  source: /note="Description of Artificial Sequence: Synthetic polypeptide"
EIVMTQSPGTLSLSPGESATLSCRASQRVASNYLAWYQHKPGQAPSLLISGASSRATGVPDRFSGSGSGTDFTLAISRLEPEDSAVYYCQHYDSSPSWTFGQGTKVEIK

SEQ ID NO: 484 - protein, 492 aa, Artificial Sequence
  source: /note="Description of Artificial Sequence: Synthetic polypeptide"
MALPVTALLLPLALLLHAARPEVQLVETGGGLVQPGGSLRLSCAASGFTFSSYAMSWVRQAPGKGLEWVSAISGSGGSTYYADSVKGRFTMSRENDKNSVFLQMNSLRVEDTGVYYCARANYKRELRYYYGMDVWGQGTMVTVSSGGGGSGGGGSGGGGSEIVMTQSPGTLSLSPGESATLSCRASQRVASNYLAWYQHKPGQAPSLLISGASSRATGVPDRFSGSGSGTDFTLAISRLEPEDSAVYYCQHYDSSPSWTFGQGTKVEIKTTTPAPRPPTPAPTIASQPLSLRPEACRPAAGGAVHTRGLDFACDIYIWAPLAGTCGVLLLSLVITLYCKRGRKKLLYIFKQPFMRPVQTTQEEDGCSCRFPEEEEGGCELRVKFSRSADAPAYKQGQNQLYNELNLGRREEYDVLDKRRGRDPEMGGKPRRKNPQEGLYNELQKDKMAEAYSEIGMKGERRRGKGHDGLYQGLSTATKDTYDALHMQALPPR

SEQ ID NO: 485 - DNA, 1476 bp, Artificial Sequence
  source: /note="Description of Artificial Sequence: Synthetic polynucleotide"
atggccctccctgtcaccgccctgctgcttccgctggctcttctgctccacgccgctcggcccgaagtgcaactggtggaaaccggtggaggactcgtgcagcctggcggcagcctccggctgagctgcgccgcttcgggattcaccttttcctcctacgcgatgtcttgggtcagacaggcccccggaaaggggctggaatgggtgtcagccatctccggctccggcggatcaacgtactacgccgactccgtgaaaggccggttcaccatgtcgcgcgagaatgacaagaactccgtgttcctgcaaatgaactccctgagggtggaggacaccggagtgtactattgtgcgcgcgccaactacaagagagagctgcggtactactacggaatggacgtctggggacagggaactatggtgaccgtgtcatccggtggagggggaagcggcggtggaggcagcgggggcgggggttcagaaattgtcatgacccagtccccgggaactctttccctctcccccggggaatccgcgactttgtcctgccgggccagccagcgcgtggcctcgaactacctcgcatggtaccagcataagccaggccaagccccttccctgctgatttccggggctagcagccgcgccactggcgtgccggataggttctcgggaagcggctcgggtaccgatttcaccctggcaatctcgcggctggaaccggaggattcggccgtgtactactgccagcactatgactcatccccctcctggacattcggacagggcaccaaggtcgagatcaagaccactaccccagcaccgaggccacccaccccggctcctaccatcgcctcccagcctctgtccctgcgtccggaggcatgtagacccgcagctggtggggccgtgcatacccggggtcttgacttcgcctgcgatatctacatttgggcccctctggctggtacttgcggggtcctgctgctttcactcgtgatcactctttactgtaagcgcggtcggaagaagctgctgtacatctttaagcaacccttcatgaggcctgtgcagactactcaagaggaggacggctgttcatgccggttcccagaggaggaggaaggcggctgcgaactgcgcgtgaaattcagccgcagcgcagatgctccagcctacaagcaggggcagaaccagctctacaacgaactcaatcttggtcggagagaggagtacgacgtgctggacaagcggagaggacgggacccagaaatgggcgggaagccgcgcagaaagaatccccaagagggcctgtacaacgagctccaaaaggataagatggcagaagcctatagcgagattggtatgaaaggggaacgcagaagaggcaaaggccacgacggactgtaccagggactcagcaccgccaccaaggacacctatgacgctcttcacatgcaggccctgccgcctcgg

SEQ ID NO: 486 - protein, 244 aa, Artificial Sequence
  source: /note="Description of Artificial Sequence: Synthetic polypeptide"
EVQLLETGGGLVQPGGSLRLSCAASGFSFSSYAMSWVRQAPGKGLEWVSAISGSGGSTYYADSVKGRFTISRDNSKNTLYLQMNSLRAEDTAVYYCAKALVGATGAFDIWGQGTLVTVSSGGGGSGGGGSGGGGSEIVLTQSPGTLSLSPGERATLSCRASQSLSSNFLAWYQQKPGQAPGLLIYGASNWATGTPDRFSGSGSGTDFTLTITRLEPEDFAVYYCQYYGTSPMYTFGQGTKVEIK

SEQ ID NO: 487 - DNA, 732 bp, Artificial Sequence
  source: /note="Description of Artificial Sequence: Synthetic polynucleotide"
gaagtgcagctgctcgaaaccggtggagggctggtgcagccagggggctccctgaggctttcatgcgccgctagcggattctccttctcctcttacgccatgtcgtgggtccgccaagcccctggaaaaggcctggaatgggtgtccgcgatttccgggagcggaggttcgacctattacgccgactccgtgaagggccgctttaccatctcccgggataactccaagaacactctgtacctccaaatgaactcgctgagagccgaggacaccgccgtgtattactgcgcgaaggcgctggtcggcgcgactggggcattcgacatctggggacagggaactcttgtgaccgtgtcgagcggaggcggcggctccggcggaggagggagcgggggcggtggttccgaaatcgtgttgactcagtccccgggaaccctgagcttgtcacccggggagcgggccactctctcctgtcgcgcctcccaatcgctctcatccaatttcctggcctggtaccagcagaagcccggacaggccccgggcctgctcatctacggcgcttcaaactgggcaacgggaacccctgatcggttcagcggaagcggatcgggtactgactttaccctgaccatcaccagactggaaccggaggacttcgccgtgtactactgccagtactacggcacctcccccatgtacacattcggacagggtaccaaggtcgagattaag

SEQ ID NO: 488 - protein, 120 aa, Artificial Sequence
  source: /note="Description of Artificial Sequence: Synthetic polypeptide"
EVQLLETGGGLVQPGGSLRLSCAASGFSFSSYAMSWVRQAPGKGLEWVSAISGSGGSTYYADSVKGRFTISRDNSKNTLYLQMNSLRAEDTAVYYCAKALVGATGAFDIWGQGTLVTVSS

SEQ ID NO: 489 - protein, 109 aa, Artificial Sequence
  source: /note="Description of Artificial Sequence: Synthetic polypeptide"
EIVLTQSPGTLSLSPGERATLSCRASQSLSSNFLAWYQQKPGQAPGLLIYGASNWATGTPDRFSGSGSGTDFTLTITRLEPEDFAVYYCQYYGTSPMYTFGQGTKVEIK

SEQ ID NO: 490 - protein, 488 aa, Artificial Sequence
  source: /note="Description of Artificial Sequence: Synthetic polypeptide"
MALPVTALLLPLALLLHAARPEVQLLETGGGLVQPGGSLRLSCAASGFSFSSYAMSWVRQAPGKGLEWVSAISGSGGSTYYADSVKGRFTISRDNSKNTLYLQMNSLRAEDTAVYYCAKALVGATGAFDIWGQGTLVTVSSGGGGSGGGGSGGGGSEIVLTQSPGTLSLSPGERATLSCRASQSLSSNFLAWYQQKPGQAPGLLIYGASNWATGTPDRFSGSGSGTDFTLTITRLEPEDFAVYYCQYYGTSPMYTFGQGTKVEIKTTTPAPRPPTPAPTIASQPLSLRPEACRPAAGGAVHTRGLDFACDIYIWAPLAGTCGVLLLSLVITLYCKRGRKKLLYIFKQPFMRPVQTTQEEDGCSCRFPEEEEGGCELRVKFSRSADAPAYKQGQNQLYNELNLGRREEYDVLDKRRGRDPEMGGKPRRKNPQEGLYNELQKDKMAEAYSEIGMKGERRRGKGHDGLYQGLSTATKDTYDALHMQALPPR

SEQ ID NO: 491 - DNA, 1464 bp, Artificial Sequence
  source: /note="Description of Artificial Sequence: Synthetic polynucleotide"
atggccctccctgtcaccgccctgctgcttccgctggctcttctgctccacgccgctcggcccgaagtgcagctgctcgaaaccggtggagggctggtgcagccagggggctccctgaggctttcatgcgccgctagcggattctccttctcctcttacgccatgtcgtgggtccgccaagcccctggaaaaggcctggaatgggtgtccgcgatttccgggagcggaggttcgacctattacgccgactccgtgaagggccgctttaccatctcccgggataactccaagaacactctgtacctccaaatgaactcgctgagagccgaggacaccgccgtgtattactgcgcgaaggcgctggtcggcgcgactggggcattcgacatctggggacagggaactcttgtgaccgtgtcgagcggaggcggcggctccggcggaggagggagcgggggcggtggttccgaaatcgtgttgactcagtccccgggaaccctgagcttgtcacccggggagcgggccactctctcctgtcgcgcctcccaatcgctctcatccaatttcctggcctggtaccagcagaagcccggacaggccccgggcctgctcatctacggcgcttcaaactgggcaacgggaacccctgatcggttcagcggaagcggatcgggtactgactttaccctgaccatcaccagactggaaccggaggacttcgccgtgtactactgccagtactacggcacctcccccatgtacacattcggacagggtaccaaggtcgagattaagaccactaccccagcaccgaggccacccaccccggctcctaccatcgcctcccagcctctgtccctgcgtccggaggcatgtagacccgcagctggtggggccgtgcatacccggggtcttgacttcgcctgcgatatctacatttgggcccctctggctggtacttgcggggtcctgctgctttcactcgtgatcactctttactgtaagcgcggtcggaagaagctgctgtacatctttaagcaacccttcatgaggcctgtgcagactactcaagaggaggacggctgttcatgccggttcccagaggaggaggaaggcggctgcgaactgcgcgtgaaattcagccgcagcgcagatgctccagcctacaagcaggggcagaaccagctctacaacgaactcaatcttggtcggagagaggagtacgacgtgctggacaagcggagaggacgggacccagaaatgggcgggaagccgcgcagaaagaatccccaagagggcctgtacaacgagctccaaaaggataagatggcagaagcctatagcgagattggtatgaaaggggaacgcagaagaggcaaaggccacgacggactgtaccagggactcagcaccgccaccaaggacacctatgacgctcttcacatgcaggccctgccgcctcgg

SEQ ID NO: 492 - protein, 244 aa, Artificial Sequence
  source: /note="Description of Artificial Sequence: Synthetic polypeptide"
EVQLLESGGGLVQPGGSLRLSCAASGFTFSSYAMSWVRQAPGKGLEWVSAISGSGGSTYYADSVKGRFTISRDNSKNTLYLQMNSLRAEDTAVYYCVLWFGEGFDPWGQGTLVTVSSGGGGSGGGGSGGGGSDIVLTQSPLSLPVTPGEPASISCRSSQSLLHSNGYNYLDWYLQKPGQSPQLLIYLGSNRASGVPDRFSGSGSGTDFTLKISRVEAEDVGVYYCMQALQTPLTFGGGTKVDIK

SEQ ID NO: 493 - DNA, 733 bp, Artificial Sequence
  source: /note="Description of Artificial Sequence: Synthetic polynucleotide"
gaagtgcagctgcttgagagcggtggaggtctggtgcagcccgggggatcactgcgcctgtcctgtgccgcgtccggtttcactttctcctcgtacgccatgtcgtgggtcagacaggcaccgggaaagggactggaatgggtgtcagccatttcgggttcggggggcagcacctactacgctgactccgtgaagggccggttcaccatttcccgcgacaactccaagaacaccttgtacctccaaatgaactccctgcgggccgaagataccgccgtgtattactgcgtgctgtggttcggagagggattcgacccgtggggacaaggaacactcgtgactgtgtcatccggcggaggcggcagcggtggcggcggttccggcggcggcggatctgacatcgtgttgacccagtcccctctgagcctgccggtcactcctggcgaaccagccagcatctcctgccggtcgagccagtccctcctgcactccaatgggtacaactacctcgattggtatctgcaaaagccgggccagagcccccagctgctgatctaccttgggtcaaaccgcgcttccggggtgcctgatagattctccgggtccgggagcggaaccgactttaccctgaaaatctcgagggtggaggccgaggacgtcggagtgtactactgcatgcaggcgctccagactcccctgaccttcggaggaggaacgaaggtcgacatcaaga

SEQ ID NO: 494 - protein, 117 aa, Artificial Sequence
  source: /note="Description of Artificial Sequence: Synthetic polypeptide"
EVQLLESGGGLVQPGGSLRLSCAASGFTFSSYAMSWVRQAPGKGLEWVSAISGSGGSTYYADSVKGRFTISRDNSKNTLYLQMNSLRAEDTAVYYCVLWFGEGFDPWGQGTLVTVSS

SEQ ID NO: 495 - protein, 112 aa, Artificial Sequence
  source: /note="Description of Artificial Sequence: Synthetic polypeptide"
DIVLTQSPLSLPVTPGEPASISCRSSQSLLHSNGYNYLDWYLQKPGQSPQLLIYLGSNRASGVPDRFSGSGSGTDFTLKISRVEAEDVGVYYCMQALQTPLTFGGGTKVDIK

SEQ ID NO: 496 - protein, 488 aa, Artificial Sequence
  source: /note="Description of Artificial Sequence: Synthetic polypeptide"
MALPVTALLLPLALLLHAARPEVQLLESGGGLVQPGGSLRLSCAASGFTFSSYAMSWVRQAPGKGLEWVSAISGSGGSTYYADSVKGRFTISRDNSKNTLYLQMNSLRAEDTAVYYCVLWFGEGFDPWGQGTLVTVSSGGGGSGGGGSGGGGSDIVLTQSPLSLPVTPGEPASISCRSSQSLLHSNGYNYLDWYLQKPGQSPQLLIYLGSNRASGVPDRFSGSGSGTDFTLKISRVEAEDVGVYYCMQALQTPLTFGGGTKVDIKTTTPAPRPPTPAPTIASQPLSLRPEACRPAAGGAVHTRGLDFACDIYIWAPLAGTCGVLLLSLVITLYCKRGRKKLLYIFKQPFMRPVQTTQEEDGCSCRFPEEEEGGCELRVKFSRSADAPAYKQGQNQLYNELNLGRREEYDVLDKRRGRDPEMGGKPRRKNPQEGLYNELQKDKMAEAYSEIGMKGERRRGKGHDGLYQGLSTATKDTYDALHMQALPPR

SEQ ID NO: 497 - DNA, 1464 bp, Artificial Sequence
  source: /note="Description of Artificial Sequence: Synthetic polynucleotide"
atggccctccctgtcaccgccctgctgcttccgctggctcttctgctccacgccgctcggcccgaagtgcagctgcttgagagcggtggaggtctggtgcagcccgggggatcactgcgcctgtcctgtgccgcgtccggtttcactttctcctcgtacgccatgtcgtgggtcagacaggcaccgggaaagggactggaatgggtgtcagccatttcgggttcggggggcagcacctactacgctgactccgtgaagggccggttcaccatttcccgcgacaactccaagaacaccttgtacctccaaatgaactccctgcgggccgaagataccgccgtgtattactgcgtgctgtggttcggagagggattcgacccgtggggacaaggaacactcgtgactgtgtcatccggcggaggcggcagcggtggcggcggttccggcggcggcggatctgacatcgtgttgacccagtcccctctgagcctgccggtcactcctggcgaaccagccagcatctcctgccggtcgagccagtccctcctgcactccaatgggtacaactacctcgattggtatctgcaaaagccgggccagagcccccagctgctgatctaccttgggtcaaaccgcgcttccggggtgcctgatagattctccgggtccgggagcggaaccgactttaccctgaaaatctcgagggtggaggccgaggacgtcggagtgtactactgcatgcaggcgctccagactcccctgaccttcggaggaggaacgaaggtcgacatcaagaccactaccccagcaccgaggccacccaccccggctcctaccatcgcctcccagcctctgtccctgcgtccggaggcatgtagacccgcagctggtggggccgtgcatacccggggtcttgacttcgcctgcgatatctacatttgggcccctctggctggtacttgcggggtcctgctgctttcactcgtgatcactctttactgtaagcgcggtcggaagaagctgctgtacatctttaagcaacccttcatgaggcctgtgcagactactcaagaggaggacggctgttcatgccggttcccagaggaggaggaaggcggctgcgaactgcgcgtgaaattcagccgcagcgcagatgctccagcctacaagcaggggcagaaccagctctacaacgaactcaatcttggtcggagagaggagtacgacgtgctggacaagcggagaggacgggacccagaaatgggcgggaagccgcgcagaaagaatccccaagagggcctgtacaacgagctccaaaaggataagatggcagaagcctatagcgagattggtatgaaaggggaacgcagaagaggcaaaggccacgacggactgtaccagggactcagcaccgccaccaaggacacctatgacgctcttcacatgcaggccctgccgcctcgg

SEQ ID NO: 498 - protein, 251 aa, Artificial Sequence
  source: /note="Description of Artificial Sequence: Synthetic polypeptide"
QVQLVESGGGLVQPGGSLRLSCAASGFTFSSYAMSWVRQAPGKGLEWVSAISGSGGSTYYADSVKGRFTISRDNSKNTLYLQMNSLRAEDTAVYYCAKVGYDSSGYYRDYYGMDVWGQGTTVTVSSGGGGSGGGGSGGGGSEIVLTQSPGTLSLSPGERATLSCRASQSVSSSYLAWYQQKPGQAPRLLIYGTSSRATGISDRFSGSGSGTDFTLTISRLEPEDFAVYYCQHYGNSPPKFTFGPGTKLEIK

SEQ ID NO: 499 - DNA, 753 bp, Artificial Sequence
  source: /note="Description of Artificial Sequence: Synthetic polynucleotide"
caagtgcagctcgtggagtcaggcggaggactggtgcagcccgggggctccctgagactttcctgcgcggcatcgggttttaccttctcctcctatgctatgtcctgggtgcgccaggccccgggaaagggactggaatgggtgtccgcaatcagcggtagcgggggctcaacatactacgccgactccgtcaagggtcgcttcactatttcccgggacaactccaagaataccctgtacctccaaatgaacagcctcagggccgaggatactgccgtgtactactgcgccaaagtcggatacgatagctccggttactaccgggactactacggaatggacgtgtggggacagggcaccaccgtgaccgtgtcaagcggcggaggcggttcaggagggggaggctccggcggtggagggtccgaaatcgtcctgactcagtcgcctggcactctgtcgttgtccccgggggagcgcgctaccctgtcgtgtcgggcgtcgcagtccgtgtcgagctcctacctcgcgtggtaccagcagaagcccggacaggcccctagacttctgatctacggcacttcttcacgcgccaccgggatcagcgacaggttcagcggctccggctccgggaccgacttcaccctgaccattagccggctggagcctgaagatttcgccgtgtattactgccaacactacggaaactcgccgccaaagttcacgttcggacccggaaccaagctggaaatcaag

SEQ ID NO: 500 - protein, 126 aa, Artificial Sequence
  source: /note="Description of Artificial Sequence: Synthetic polypeptide"
QVQLVESGGGLVQPGGSLRLSCAASGFTFSSYAMSWVRQAPGKGLEWVSAISGSGGSTYYADSVKGRFTISRDNSKNTLYLQMNSLRAEDTAVYYCAKVGYDSSGYYRDYYGMDVWGQGTTVTVSS

SEQ ID NO: 501 - protein, 110 aa, Artificial Sequence
  source: /note="Description of Artificial Sequence: Synthetic polypeptide"
EIVLTQSPGTLSLSPGERATLSCRASQSVSSSYLAWYQQKPGQAPRLLIYGTSSRATGISDRFSGSGSGTDFTLTISRLEPEDFAVYYCQHYGNSPPKFTFGPGTKLEIK

SEQ ID NO: 502 - protein, 495 aa, Artificial Sequence
  source: /note="Description of Artificial Sequence: Synthetic polypeptide"
MALPVTALLLPLALLLHAARPQVQLVESGGGLVQPGGSLRLSCAASGFTFSSYAMSWVRQAPGKGLEWVSAISGSGGSTYYADSVKGRFTISRDNSKNTLYLQMNSLRAEDTAVYYCAKVGYDSSGYYRDYYGMDVWGQGTTVTVSSGGGGSGGGGSGGGGSEIVLTQSPGTLSLSPGERATLSCRASQSVSSSYLAWYQQKPGQAPRLLIYGTSSRATGISDRFSGSGSGTDFTLTISRLEPEDFAVYYCQHYGNSPPKFTFGPGTKLEIKTTTPAPRPPTPAPTIASQPLSLRPEACRPAAGGAVHTRGLDFACDIYIWAPLAGTCGVLLLSLVITLYCKRGRKKLLYIFKQPFMRPVQTTQEEDGCSCRFPEEEEGGCELRVKFSRSADAPAYKQGQNQLYNELNLGRREEYDVLDKRRGRDPEMGGKPRRKNPQEGLYNELQKDKMAEAYSEIGMKGERRRGKGHDGLYQGLSTATKDTYDALHMQALPPR

SEQ ID NO: 503 - DNA, 1485 bp, Artificial Sequence
  source: /note="Description of Artificial Sequence: Synthetic polynucleotide"
atggccctccctgtcaccgccctgctgcttccgctggctcttctgctccacgccgctcggccccaagtgcagctcgtggagtcaggcggaggactggtgcagcccgggggctccctgagactttcctgcgcggcatcgggttttaccttctcctcctatgctatgtcctgggtgcgccaggccccgggaaagggactggaatgggtgtccgcaatcagcggtagcgggggctcaacatactacgccgactccgtcaagggtcgcttcactatttcccgggacaactccaagaataccctgtacctccaaatgaacagcctcagggccgaggatactgccgtgtactactgcgccaaagtcggatacgatagctccggttactaccgggactactacggaatggacgtgtggggacagggcaccaccgtgaccgtgtcaagcggcggaggcggttcaggagggggaggctccggcggtggagggtccgaaatcgtcctgactcagtcgcctggcactctgtcgttgtccccgggggagcgcgctaccctgtcgtgtcgggcgtcgcagtccgtgtcgagctcctacctcgcgtggtaccagcagaagcccggacaggcccctagacttctgatctacggcacttcttcacgcgccaccgggatcagcgacaggttcagcggctccggctccgggaccgacttcaccctgaccattagccggctggagcctgaagatttcgccgtgtattactgccaacactacggaaactcgccgccaaagttcacgttcggacccggaaccaagctggaaatcaagaccactaccccagcaccgaggccacccaccccggctcctaccatcgcctcccagcctctgtccctgcgtccggaggcatgtagacccgcagctggtggggccgtgcatacccggggtcttgacttcgcctgcgatatctacatttgggcccctctggctggtacttgcggggtcctgctgctttcactcgtgatcactctttactgtaagcgcggtcggaagaagctgctgtacatctttaagcaacccttcatgaggcctgtgcagactactcaagaggaggacggctgttcatgccggttcccagaggaggaggaaggcggctgcgaactgcgcgtgaaattcagccgcagcgcagatgctccagcctacaagcaggggcagaaccagctctacaacgaactcaatcttggtcggagagaggagtacgacgtgctggacaagcggagaggacgggacccagaaatgggcgggaagccgcgcagaaagaatccccaagagggcctgtacaacgagctccaaaaggataagatggcagaagcctatagcgagattggtatgaaaggggaacgcagaagaggcaaaggccacgacggactgtaccagggactcagcaccgccaccaaggacacctatgacgctcttcacatgcaggccctgccgcctcgg

SEQ ID NO: 504 - protein, 246 aa, Artificial Sequence
  source: /note="Description of Artificial Sequence: Synthetic polypeptide"
EVQLVESGGGLVQPGGSLRLSCAASGFTFSSYAMSWVRQAPGKGLEWVSAISGSGGSTYYADSVKGRFTISRDNSKNTLYLQMNSLRAEDTAVYYCAKMGWSSGYLGAFDIWGQGTTVTVSSGGGGSGGGGSGGGGSEIVLTQSPGTLSLSPGERATLSCRASQSVASSFLAWYQQKPGQAPRLLIYGASGRATGIPDRFSGSGSGTDFTLTISRLEPEDFAVYYCQHYGGSPRLTFGGGTKVDIK

SEQ ID NO: 505 - DNA, 739 bp, Artificial Sequence
  source: /note="Description of Artificial Sequence: Synthetic polynucleotide"
gaagtccaactggtggagtccgggggagggctcgtgcagcccggaggcagccttcggctgtcgtgcgccgcctccgggttcacgttctcatcctacgcgatgtcgtgggtcagacaggcaccaggaaagggactggaatgggtgtccgccattagcggctccggcggtagcacctactatgccgactcagtgaagggaaggttcactatctcccgcgacaacagcaagaacaccctgtacctccaaatgaactctctgcgggccgaggataccgcggtgtactattgcgccaagatgggttggtccagcggatacttgggagccttcgacatttggggacagggcactactgtgaccgtgtcctccgggggtggcggatcgggaggcggcggctcgggtggagggggttccgaaatcgtgttgacccagtcaccgggaaccctctcgctgtccccgggagaacgggctacactgtcatgtagagcgtcccagtccgtggcttcctcgttcctggcctggtaccagcagaagccgggacaggcaccccgcctgctcatctacggagccagcggccgggcgaccggcatccctgaccgcttctccggttccggctcgggcaccgactttactctgaccattagcaggcttgagcccgaggattttgccgtgtactactgccaacactacggggggagccctcgcctgaccttcggaggcggaactaaggtcgatatcaaaa

SEQ ID NO: 506 - protein, 122 aa, Artificial Sequence
  source: /note="Description of Artificial Sequence: Synthetic polypeptide"
EVQLVESGGGLVQPGGSLRLSCAASGFTFSSYAMSWVRQAPGKGLEWVSAISGSGGSTYYADSVKGRFTISRDNSKNTLYLQMNSLRAEDTAVYYCAKMGWSSGYLGAFDIWGQGTTVTVSS

SEQ ID NO: 507 - protein, 109 aa, Artificial Sequence
  source: /note="Description of Artificial Sequence: Synthetic polypeptide"
EIVLTQSPGTLSLSPGERATLSCRASQSVASSFLAWYQQKPGQAPRLLIYGASGRATGIPDRFSGSGSGTDFTLTISRLEPEDFAVYYCQHYGGSPRLTFGGGTKVDIK

SEQ ID NO: 508 - protein, 490 aa, Artificial Sequence
  source: /note="Description of Artificial Sequence: Synthetic polypeptide"
MALPVTALLLPLALLLHAARPEVQLVESGGGLVQPGGSLRLSCAASGFTFSSYAMSWVRQAPGKGLEWVSAISGSGGSTYYADSVKGRFTISRDNSKNTLYLQMNSLRAEDTAVYYCAKMGWSSGYLGAFDIWGQGTTVTVSSGGGGSGGGGSGGGGSEIVLTQSPGTLSLSPGERATLSCRASQSVASSFLAWYQQKPGQAPRLLIYGASGRATGIPDRFSGSGSGTDFTLTISRLEPEDFAVYYCQHYGGSPRLTFGGGTKVDIKTTTPAPRPPTPAPTIASQPLSLRPEACRPAAGGAVHTRGLDFACDIYIWAPLAGTCGVLLLSLVITLYCKRGRKKLLYIFKQPFMRPVQTTQEEDGCSCRFPEEEEGGCELRVKFSRSADAPAYKQGQNQLYNELNLGRREEYDVLDKRRGRDPEMGGKPRRKNPQEGLYNELQKDKMAEAYSEIGMKGERRRGKGHDGLYQGLSTATKDTYDALHMQALPPR

SEQ ID NO: 509 - DNA, 1470 bp, Artificial Sequence
  source: /note="Description of Artificial Sequence: Synthetic polynucleotide"
atggccctccctgtcaccgccctgctgcttccgctggctcttctgctccacgccgctcggcccgaagtccaactggtggagtccgggggagggctcgtgcagcccggaggcagccttcggctgtcgtgcgccgcctccgggttcacgttctcatcctacgcgatgtcgtgggtcagacaggcaccaggaaagggactggaatgggtgtccgccattagcggctccggcggtagcacctactatgccgactcagtgaagggaaggttcactatctcccgcgacaacagcaagaacaccctgtacctccaaatgaactctctgcgggccgaggataccgcggtgtactattgcgccaagatgggttggtccagcggatacttgggagccttcgacatttggggacagggcactactgtgaccgtgtcctccgggggtggcggatcgggaggcggcggctcgggtggagggggttccgaaatcgtgttgacccagtcaccgggaaccctctcgctgtccccgggagaacgggctacactgtcatgtagagcgtcccagtccgtggcttcctcgttcctggcctggtaccagcagaagccgggacaggcaccccgcctgctcatctacggagccagcggccgggcgaccggcatccctgaccgcttctccggttccggctcgggcaccgactttactctgaccattagcaggcttgagcccgaggattttgccgtgtactactgccaacactacggggggagccctcgcctgaccttcggaggcggaactaaggtcgatatcaaaaccactaccccagcaccgaggccacccaccccggctcctaccatcgcctcccagcctctgtccctgcgtccggaggcatgtagacccgcagctggtggggccgtgcatacccggggtcttgacttcgcctgcgatatctacatttgggcccctctggctggtacttgcggggtcctgctgctttcactcgtgatcactctttactgtaagcgcggtcggaagaagctgctgtacatctttaagcaacccttcatgaggcctgtgcagactactcaagaggaggacggctgttcatgccggttcccagaggaggaggaaggcggctgcgaactgcgcgtgaaattcagccgcagcgcagatgctccagcctacaagcaggggcagaaccagctctacaacgaactcaatcttggtcggagagaggagtacgacgtgctggacaagcggagaggacgggacccagaaatgggcgggaagccgcgcagaaagaatccccaagagggcctgtacaacgagctccaaaaggataagatggcagaagcctatagcgagattggtatgaaaggggaacgcagaagaggcaaaggccacgacggactgtaccagggactcagcaccgccaccaaggacacctatgacgctcttcacatgcaggccctgccgcctcgg

SEQ ID NO: 510 - protein, 122 aa, Artificial Sequence
  source: /note="Description of Artificial Sequence: Synthetic polypeptide"
QIQLVQSGPDLKKPGETVKLSCKASGYTFTNFGMNWVKQAPGKGFKWMAWINTYTGESYFADDFKGRFAFSVETSATTAYLQINNLKTEDTATYFCARGEIYYGYDGGFAYWGQGTLVTVSA

SEQ ID NO: 511 - protein, 107 aa, Artificial Sequence
  source: /note="Description of Artificial Sequence: Synthetic polypeptide"
DVVMTQSHRFMSTSVGDRVSITCRASQDVNTAVSWYQQKPGQSPKLLIFSASYRYTGVPDRFTGSGSGADFTLTISSVQAEDLAVYYCQQHYSTPWTFGGGTKLDIK

SEQ ID NO: 512 - protein, 244 aa, Artificial Sequence
  source: /note="Description of Artificial Sequence: Synthetic polypeptide"
QIQLVQSGPDLKKPGETVKLSCKASGYTFTNFGMNWVKQAPGKGFKWMAWINTYTGESYFADDFKGRFAFSVETSATTAYLQINNLKTEDTATYFCARGEIYYGYDGGFAYWGQGTLVTVSAGGGGSGGGGSGGGGSDVVMTQSHRFMSTSVGDRVSITCRASQDVNTAVSWYQQKPGQSPKLLIFSASYRYTGVPDRFTGSGSGADFTLTISSVQAEDLAVYYCQQHYSTPWTFGGGTKLDIK

SEQ ID NO: 513 - protein, 467 aa, Artificial Sequence
  source: /note="Description of Artificial Sequence: Synthetic polypeptide"
QIQLVQSGPDLKKPGETVKLSCKASGYTFTNFGMNWVKQAPGKGFKWMAWINTYTGESYFADDFKGRFAFSVETSATTAYLQINNLKTEDTATYFCARGEIYYGYDGGFAYWGQGTLVTVSAGGGGSGGGGSGGGGSDVVMTQSHRFMSTSVGDRVSITCRASQDVNTAVSWYQQKPGQSPKLLIFSASYRYTGVPDRFTGSGSGADFTLTISSVQAEDLAVYYCQQHYSTPWTFGGGTKLDIKTTTPAPRPPTPAPTIASQPLSLRPEACRPAAGGAVHTRGLDFACDIYIWAPLAGTCGVLLLSLVITLYCKRGRKKLLYIFKQPFMRPVQTTQEEDGCSCRFPEEEEGGCELRVKFSRSADAPAYKQGQNQLYNELNLGRREEYDVLDKRRGRDPEMGGKPRRKNPQEGLYNELQKDKMAEAYSEIGMKGERRRGKGHDGLYQGLSTATKDTYDALHMQALPPR

SEQ ID NO: 514 - protein, 117 aa, Artificial Sequence
  source: /note="Description of Artificial Sequence: Synthetic polypeptide"
QIQLVQSGPELKKPGETVKISCKASGYTFTDYSINWVKRAPGKGLKWMGWINTETREPAYAYDFRGRFAFSLETSASTAYLQINNLKYEDTATYFCALDYSYAMDYWGQGTSVTVSS

SEQ ID NO: 515 - protein, 111 aa, Artificial Sequence
  source: /note="Description of Artificial Sequence: Synthetic polypeptide"
DIVLTQSPASLAMSLGKRATISCRASESVSVIGAHLIHWYQQKPGQPPKLLIYLASNLETGVPARFSGSGSGTDFTLTIDPVEEDDVAIYSCLQSRIFPRTFGGGTKLEIK

SEQ ID NO: 516 - protein, 249 aa, Artificial Sequence
  source: /note="Description of Artificial Sequence: Synthetic polypeptide"
QIQLVQSGPELKKPGETVKISCKASGYTFTDYSINWVKRAPGKGLKWMGWINTETREPAYAYDFRGRFAFSLETSASTAYLQINNLKYEDTATYFCALDYSYAMDYWGQGTSVTVSSGGGGSGGGGSGGGGSQIQLVQSGPELKKPGETVKISCKASGYTFTDYSINWVKRAPGKGLKWMGWINTETREPAYAYDFRGRFAFSLETSASTAYLQINNLKYEDTATYFCALDYSYAMDYWGQGTSVTVSS

SEQ ID NO: 517 - protein, 472 aa, Artificial Sequence
  source: /note="Description of Artificial Sequence: Synthetic polypeptide"
QIQLVQSGPELKKPGETVKISCKASGYTFTDYSINWVKRAPGKGLKWMGWINTETREPAYAYDFRGRFAFSLETSASTAYLQINNLKYEDTATYFCALDYSYAMDYWGQGTSVTVSSGGGGSGGGGSGGGGSQIQLVQSGPELKKPGETVKISCKASGYTFTDYSINWVKRAPGKGLKWMGWINTETREPAYAYDFRGRFAFSLETSASTAYLQINNLKYEDTATYFCALDYSYAMDYWGQGTSVTVSSTTTPAPRPPTPAPTIASQPLSLRPEACRPAAGGAVHTRGLDFACDIYIWAPLAGTCGVLLLSLVITLYCKRGRKKLLYIFKQPFMRPVQTTQEEDGCSCRFPEEEEGGCELRVKFSRSADAPAYKQGQNQLYNELNLGRREEYDVLDKRRGRDPEMGGKPRRKNPQEGLYNELQKDKMAEAYSEIGMKGERRRGKGHDGLYQGLSTATKDTYDALHMQALPPR

SEQ ID NO: 518 - protein, 117 aa, Artificial Sequence
  source: /note="Description of Artificial Sequence: Synthetic polypeptide"
QIQLVQSGPELKKPGETVKISCKASGYTFRHYSMNWVKQAPGKGLKWMGRINTESGVPIYADDFKGRFAFSVETSASTAYLVINNLKDEDTASYFCSNDYLYSLDFWGQGTALTVSS

SEQ ID NO: 519 - protein, 111 aa, Artificial Sequence
  source: /note="Description of Artificial Sequence: Synthetic polypeptide"
DIVLTQSPPSLAMSLGKRATISCRASESVTILGSHLIYWYQQKPGQPPTLLIQLASNVQTGVPARFSGSGSRTDFTLTIDPVEEDDVAVYYCLQSRTIPRTFGGGTKLEIK

SEQ ID NO: 520 - protein, 243 aa, Artificial Sequence
  source: /note="Description of Artificial Sequence: Synthetic polypeptide"
QIQLVQSGPELKKPGETVKISCKASGYTFRHYSMNWVKQAPGKGLKWMGRINTESGVPIYADDFKGRFAFSVETSASTAYLVINNLKDEDTASYFCSNDYLYSLDFWGQGTALTVSSGGGGSGGGGSGGGGSDIVLTQSPPSLAMSLGKRATISCRASESVTILGSHLIYWYQQKPGQPPTLLIQLASNVQTGVPARFSGSGSRTDFTLTIDPVEEDDVAVYYCLQSRTIPRTFGGGTKLEIK

SEQ ID NO: 521 - protein, 466 aa, Artificial Sequence
  source: /note="Description of Artificial Sequence: Synthetic polypeptide"
QIQLVQSGPELKKPGETVKISCKASGYTFRHYSMNWVKQAPGKGLKWMGRINTESGVPIYADDFKGRFAFSVETSASTAYLVINNLKDEDTASYFCSNDYLYSLDFWGQGTALTVSSGGGGSGGGGSGGGGSDIVLTQSPPSLAMSLGKRATISCRASESVTILGSHLIYWYQQKPGQPPTLLIQLASNVQTGVPARFSGSGSRTDFTLTIDPVEEDDVAVYYCLQSRTIPRTFGGGTKLEIKTTTPAPRPPTPAPTIASQPLSLRPEACRPAAGGAVHTRGLDFACDIYIWAPLAGTCGVLLLSLVITLYCKRGRKKLLYIFKQPFMRPVQTTQEEDGCSCRFPEEEEGGCELRVKFSRSADAPAYKQGQNQLYNELNLGRREEYDVLDKRRGRDPEMGGKPRRKNPQEGLYNELQKDKMAEAYSEIGMKGERRRGKGHDGLYQGLSTATKDTYDALHMQALPPR

SEQ ID NO: 522 - protein, 117 aa, Artificial Sequence
  source: /note="Description of Artificial Sequence: Synthetic polypeptide"
QIQLVQSGPELKKPGETVKISCKASGYTFTHYSMNWVKQAPGKGLKWMGRINTETGEPLYADDFKGRFAFSLETSASTAYLVINNLKNEDTATFFCSNDYLYSCDYWGQGTTLTVSS

SEQ ID NO: 523 - protein, 111 aa, Artificial Sequence; identical to SEQ ID NO: 519
  source: /note="Description of Artificial Sequence: Synthetic polypeptide"

SEQ ID NO: 524 - protein, 243 aa, Artificial Sequence
  source: /note="Description of Artificial Sequence: Synthetic polypeptide"
QIQLVQSGPELKKPGETVKISCKASGYTFTHYSMNWVKQAPGKGLKWMGRINTETGEPLYADDFKGRFAFSLETSASTAYLVINNLKNEDTATFFCSNDYLYSCDYWGQGTTLTVSSGGGGSGGGGSGGGGSDIVLTQSPPSLAMSLGKRATISCRASESVTILGSHLIYWYQQKPGQPPTLLIQLASNVQTGVPARFSGSGSRTDFTLTIDPVEEDDVAVYYCLQSRTIPRTFGGGTKLEIK

SEQ ID NO: 525 - protein, 466 aa, Artificial Sequence
  source: /note="Description of Artificial Sequence: Synthetic polypeptide"
QIQLVQSGPELKKPGETVKISCKASGYTFTHYSMNWVKQAPGKGLKWMGRINTETGEPLYADDFKGRFAFSLETSASTAYLVINNLKNEDTATFFCSNDYLYSCDYWGQGTTLTVSSGGGGSGGGGSGGGGSDIVLTQSPPSLAMSLGKRATISCRASESVTILGSHLIYWYQQKPGQPPTLLIQLASNVQTGVPARFSGSGSRTDFTLTIDPVEEDDVAVYYCLQSRTIPRTFGGGTKLEIKTTTPAPRPPTPAPTIASQPLSLRPEACRPAAGGAVHTRGLDFACDIYIWAPLAGTCGVLLLSLVITLYCKRGRKKLLYIFKQPFMRPVQTTQEEDGCSCRFPEEEEGGCELRVKFSRSADAPAYKQGQNQLYNELNLGRREEYDVLDKRRGRDPEMGGKPRRKNPQEGLYNELQKDKMAEAYSEIGMKGERRRGKGHDGLYQGLSTATKDTYDALHMQALPPR

SEQ ID NO: 526 - protein, 4 aa, Artificial Sequence
  source: /note="Description of Artificial Sequence: Synthetic peptide"
RGDS

SEQ ID NO: 527 - protein, 15 aa, Artificial Sequence
  source: /note="Description of Artificial Sequence: Synthetic peptide"
RASKGVSTSGYSYLH

SEQ ID NO: 528 - protein, 7 aa, Artificial Sequence
  source: /note="Description of Artificial Sequence: Synthetic peptide"
LASYLES

SEQ ID NO: 529 - protein, 9 aa, Artificial Sequence
  source: /note="Description of Artificial Sequence: Synthetic peptide"
QHSRDLPLT

SEQ ID NO: 530 - protein, 5 aa, Artificial Sequence
  source: /note="Description of Artificial Sequence: Synthetic peptide"
NYYMY

SEQ ID NO: 531 - protein, 17 aa, Artificial Sequence
  source: /note="Description of Artificial Sequence: Synthetic peptide"
GINPSNGGTNFNEKFKN

SEQ ID NO: 532 - protein, 11 aa, Artificial Sequence
  source: /note="Description of Artificial Sequence: Synthetic peptide"
RDYRFDMGFDY
